United States Patent Application Publication US 2024/0271122 A1 - sequence listing, part 6

SEQ ID NO: 9892 - DNA, 1302 bp, Artificial Sequence
  Description of Artificial Sequence: Synthetic polynucleotide
atgaagaaatatttattatatatggtacaagttcatttgaactttagaagagcagaattggaatctttagcagacctttataatctttccatagacttttcccagtacgatgccaatagccctttctttattgtagagttagaaaatgatcagcaagcaaaggattggattaagaggtctattttaaccagaggtatttatgagtattgggggcagggtacaacgctcgatgagttacataaagatattcagcgtcagtctaactttgaacaggatttgcaattgaaattcaaacattccacttttaagttcgaattcgaatgctataaaggcaacagtaaagctaagagggtagagcagattgaaactttccgttaccttggctttgaaggaaagattgatatgaaacatcctcaagaggttttcactgttatagaagagtacacaccaatatctgaaaacgttggtggtaagacccccaccaggatttattttggtaggcaggttcagatgagcaataggagtgccatggagaaatatgatttgaagaaaagaccttataaaggtacaactagcttcgaagcagaattatctttggtcagcgccaatatagctcaagtgaaaccgggaactataatgtacgacccgtttgcaggtacaggatcctttttggtagctggtgggcattttggttctttagtgattggttctgatatagatggcagaatgattcgtggtaagggtgctcaagtgaacatttctgccaacttcaaaaaatatggcgagagttctcaattcctcgacgtgttgaccatggactttacaaataacgcattaagaaacaatcttgtcattgatactattttgtgtgatcctccatatggtatcagagaaagcataaaagtcttgggtgctaaggatccagaaagatttttgggcaaggaagatatggaaattgacggtgaaaaggcatatttgcgtcgcgattatattccaaccaaaaaaccgtatgctttagattctttattagatgatcttttacaatactcttccgaaagattaccgattggcggaagattagccttctggatgcccactgcaaacgacgccaatattgaaactattgtcccaatgcacgaaaatttggagttgaaatacaactgcgttcaagaattcaataaatggagcaggagattattggtttatattaataggggtagcactttcaatggaagtagtaatcatggcataaaacgttctaaagataatttcagggagagatacttcaataattttaactga

SEQ ID NO: 9893 - DNA, 1605 bp, Saccharomyces cerevisiae
atgagctctgacgaagaagatttcaacgacatctacggcgatgataagcctaccactactgaagaagtcaaaaaagaagaagaacaaaataaggctggcagtggtacctcgcaattagatcaactagccgcactacaagcattatcttctagcttgaacaaactaaataatccaaatagtaacaacagtagtagtaataatagtaaccaagacacatcttctagtaagcaagatggcactgcgaatgacaaggaaggttccaatgaagacactaagaatgaaaaaaaacaagaaagcgctacatcagcaaatgccaatgccaacgctagttctgcaggaccttctggcttaccttgggaacaacttcaacaaaccatgtcacaattccagcaaccatcttctcaatcaccacctcaacagcaagtaactcaaaccaaagaggaacgttcgaaagcggatttgtctaaagaaagttgcaagatgttcattggtggtctgaattgggacactacggaagataatcttcgcgaatattttggtaagtatggtaccgtcactgatttgaaaatcatgaaagaccctgcaacaggtagatctagagggttcggtttcttatcttttgaaaaaccttctagtgttgatgaagtggtaaagacacaacatatcctcgatggtaaagttatcgacccaaaaagagctatcccaagagacgagcaagataaaaccggtaaaatctttgttggtggtattggtcctgatgtgagaccaaaggaatttgaagaatttttttctcagtggggtacgattatcgatgcgcaactgatgttagataaggataccggtcaatcaagaggttttggttttgtgacgtatgactccgctgacgccgttgacagagtttgtcagaataaattcatcgatttcaaagatcgcaagatcgaaatcaagagagctgagccaagacatatgcaacaaaaatcatcaaacaatggtggtaacaatggtggaaacaacatgaatcgtcgtggcggtaacttcggtaaccaaggcgatttcaaccaaatgtatcaaaaccctatgatgggcggttacaacccaatgatgaatccgcaagcaatgacagattactatcaaaagatgcaagaatattaccaacaaatgcaaaagcaaactggtatggattatactcaaatgtaccaacaacaaatgcagcaaatggcaatgatgatgccagggtttgccatgccacctaatgcaatgactttaaaccaaccacagcaagattcaaatgccactcaaggttccccagcaccttctgattccgataataataaatccaatgacgtccaaactattggtaatacatcaaacactgactctggttcaccgccattgaatttacctaatggtccaaagggcccatcacaatacaatgatgaccacaatagcggttatggctacaaccgtgatcgcggtgatcgtgatcgtaacgatcgtgaccgcgattacaatcaccgtagtggtggaaaccatagaagaaacggccgtggtggtcgcggtggatacaatagacgtaataatggctaccatccatataataggtaa

SEQ ID NO: 9894 - DNA, 1605 bp, Artificial Sequence
  Description of Artificial Sequence: Synthetic polynucleotide
atgagctctgacgaagaagatttcaacgacatctacggcgatgataagcctaccactactgaagaagtcaaaaaagaagaagaacaaaataaggctggcagtggtacctctcaattagatcaattggccgcattacaagcattatcttctagcttgaacaaattgaataatccaaatagtaacaacagtagtagtaataatagtaaccaagacacatcttctagtaagcaagatggcactgcgaatgacaaggaaggttccaatgaagacactaagaatgaaaaaaaacaagaaagcgctacaagtgcaaatgccaatgccaacgctagttctgcaggaccttctggcttaccttgggaacaacttcaacaaaccatgtctcaattccagcaaccatcttctcaatctccacctcaacagcaagtaactcaaaccaaagaggaacgttctaaagcggatttgtctaaagaaagttgcaagatgttcattggtggtttgaattgggacactacggaagataatcttcgcgaatattttggtaagtatggtaccgtcactgatttgaaaatcatgaaagaccctgcaacaggtagatctagagggttcggtttcttatcttttgaaaaaccttctagtgttgatgaagtggtaaagacacaacatatcctcgatggtaaagttatcgacccaaaaagagctatcccaagagacgagcaagataaaaccggtaaaatctttgttggtggtattggtcctgatgtgagaccaaaggaatttgaagaatttttttctcagtggggtacgattatcgatgcgcaattgatgttagataaggataccggtcaatctagaggttttggttttgtgacgtatgactccgctgacgccgttgacagagtttgtcagaataaattcatcgatttcaaagatcgcaagatcgaaatcaagagagctgagccaagacatatgcaacaaaaatcttccaacaatggtggtaacaatggtggaaacaacatgaatcgtcgtggcggtaacttcggtaaccaaggcgatttcaaccaaatgtatcaaaaccctatgatgggcggttacaacccaatgatgaatccgcaagcaatgacagattactatcaaaagatgcaagaatattaccaacaaatgcaaaagcaaactggtatggattatactcaaatgtaccaacaacaaatgcagcaaatggcaatgatgatgccagggtttgccatgccacctaatgcaatgactttaaaccaaccacagcaagattctaatgccactcaaggttccccagcaccttctgattccgataataataaatccaatgacgtccaaactattggtaatacaagtaacactgactctggttctccgccattgaatttacctaatggtccaaagggcccatctcaatacaatgatgaccacaatagcggttatggctacaaccgtgatcgcggtgatcgtgatcgtaacgatcgtgaccgcgattacaatcaccgtagtggtggaaaccatagaagaaacggccgtggtggtcgcggtggatacaatagacgtaataatggctaccatccatataataggtga

SEQ ID NO: 9895 - DNA, 1728 bp, Saccharomyces cerevisiae
atggtgaacgttggtccttctcatgctgcagttgctgtggatgctagcgaagcccgcaaaagaaatatttcagaagaagtattcgaactgagggataagaaagattctacagtggtaattgagggtgaagccccggtaagaacttttaccagtagctctagtaaccatgaaagagaggatacgtatgtttctaaaaggcaggtaatgagagatatttttgctaaatacttgaagttcattggacctggattgatggttagtgtggcttacatcgatcccggtaattactctactgccgtcgatgcaggtgcctctaatcaattttccctactttgtatcattttgttatcaaactttattgccatatttttgcaatgtctgtgtatcaagttgggttccgttacgggactagatctaagtcgagcttgcagagagtatttaccacggtggctcaactggacattgtatttttttgcagaatgtgccgttatagccaccgatatagctgaagtgattggtacagcgattgccttgaatatcctgatcaaagtgccccttccagcgggcgtggccattactgttgtggatgtgtttttgattatgtttacatataaacctggtgcgtcatcaattaggttcattagaatatttgaatgttttgttgcagtattagttgttggcgtgtgcatttgtttcgcaatagaattggcttatatcccgaagagtacgtccgttaaacaagtgttcagaggatttgtgccatctgcccaaatgtttgaccacaatggtatttataccgctatttccatcttaggtgctactgttatgccacattcgttgtttttgggttccgctttagtgcagccaaggcttttagattatgacgttaaacacggtaattatactgtttctgaagaacaagataaagtgaaaaaatctaaatccactgaagagattatggaagaaaaatattttaattatagacccacgaacgctgctatcaaatattgcatgaaatattctatggtcgaattaagcataactctcttcaccctagcgcttttcgtcaattgtgccatcctagttgttgcgggctccactctatataactcaccagaagcagatggggcagatttgtttactattcatgaattattatcaagaaatctggcacccgcagcaggtacgattttcatgctcgcacttttattaagtggtcaatccgcaggtgtagtgtgtactatgtcgggtcaaattgtaagtgagggtcatattaattggaagttgcagccatggcaaagaagattggccactagatgtatttcgataatcccttgtttggtcatctctatctgtatcggtagagaagctttatcaaaggccttaaatgcttcccaagttgttttatccatagttctgccatttttggtagcacctttaattttcttcacatgtaaaaaatcaatcatgaaaaccgaaattaccgtcgaccatactgaagaagatagccataaccatcaaaataacaacgatagatctgcaggtagcgtaatcgagcaagatggttctagtggcatggagatagaaaatggaaaagatgtcaaaatcgtttatatggcaaacaattggattatcactgttattgctataattgtgtggcttttcttatctttactgaacgtttatgccattgttcaattaggcatgtctcatggtgatatcagttaa

SEQ ID NO: 9896 - DNA, 1728 bp, Artificial Sequence
  Description of Artificial Sequence: Synthetic polynucleotide
atggtgaacgttggtccttctcatgctgcagttgctgtggatgctagcgaagcccgcaaaagaaatatttctgaagaagtattcgaattgagggataagaaagattctacagtggtaattgagggtgaagccccggtaagaacttttaccagtagctctagtaaccatgaaagagaggatacgtatgtttctaaaaggcaggtaatgagagatatttttgctaaatacttgaagttcattggacctggattgatggttagtgtggcttacatcgatcccggtaattactctactgccgtcgatgcaggtgcctctaatcaattttccttactttgtatcattttgttatctaactttattgccatatttttgcaatgtttatgtatcaagttgggttccgttacgggattagatttgagtagagcttgcagagagtatttaccaagatggctcaactggacattgtatttttttgcagaatgtgccgttatagccaccgatatagctgaagtgattggtacagcgattgccttgaatatcttaatcaaagtgccccttccagcgggcgtggccattactgttgtggatgtgtttttgattatgtttacatataaacctggtgcgagttctattaggttcattagaatatttgaatgttttgttgcagtattagttgttggcgtgtgcatttgtttcgcaatagaattggcttatatcccgaagagtacgtccgttaaacaagtgttcagaggatttgtgccatctgcccaaatgtttgaccacaatggtatttataccgctatttccatcttaggtgctactgttatgccacattctttgtttttgggttccgctttagtgcagccaaggcttttagattatgacgttaaacacggtaattatactgtttctgaagaacaagataaagtgaaaaaatctaaatccactgaagagattatggaagaaaaatattttaattatagacccacgaacgctgctatcaaatattgcatgaaatattctatggtcgaattaagcataactctcttcaccttagcgcttttcgtcaattgtgccatcttggttgttgcgggctccactttatataactctccagaagcagatggggcagatttgtttactattcatgaattattatctagaaatttggcacccgcagcaggtacgattttcatgctcgcacttttattaagtggtcaatccgcaggtgtagtgtgtactatgagtggtcaaattgtaagtgagggtcatattaattggaagttgcagccatggcaaagaagattggccactagatgtatttctataatcccttgtttggtcatctctatctgtatcggtagagaagctttatccaaggccttaaatgcttcccaagttgttttatccatagttttgccatttttggtagcacctttaattttcttcacatgtaaaaaatctatcatgaaaaccgaaattaccgtcgaccatactgaagaagatagccataaccatcaaaataacaacgatagatctgcaggtagcgtaatcgagcaagatggttctagtggcatggagatagaaaatggaaaagatgtcaaaatcgtttatatggcaaacaattggattatcactgttattgctataattgtgtggcttttcttatctttattaaacgtttatgccattgttcaattaggcatgtctcatggtgatatcagttga

SEQ ID NO: 9897 - DNA, 435 bp, Saccharomyces cerevisiae
atgccaggtgtttccgttagagacgttgctgctcaagatttcattaatgcttacgcttctttcttgcaaagacaaggtaagctagaagttccaggttacgttgacattgtcaagacctcttctggtaacgaaatgccaccacaagatgccgaaggttggttctacaagcgtgctgcctctgttgccagacacatttacatgagaaaacaagttggtgttggtaaattgaacaaattatacggtggtgccaagagcagaggtgttagaccatacaagcacattgacgcttccggttctatcaacagaaaggttttgcaagctttggaaaagattggtatcgtcgaaatctctccaaagggtggtagaagaatctctgaaaacggtcaaagagatttggatcgtattgccgctcaaactttggaagaagacgaataa

SEQ ID NO: 9898 - DNA, 435 bp, Artificial Sequence
  Description of Artificial Sequence: Synthetic polynucleotide
atgccaggtgtttccgttagagacgttgctgctcaagatttcattaatgcttacgcttctttcttgcaaagacaaggtaagttggaagttccaggttacgttgacattgtcaagacctcttctggtaacgaaatgccaccacaagatgccgaaggttggttctacaagcgtgctgcctctgttgccagacacatttacatgagaaaacaagttggtgttggtaaattgaacaaattatacggtggtgccaagagcagaggtgttagaccatacaagcacattgacgcttccggttctatcaacagaaaggttttgcaagctttggaaaagattggtatcgtcgaaatctctccaaagggtggtagaagaatctctgaaaacggtcaaagagatttggatcgtattgccgctcaaactttggaagaagacgaatga

SEQ ID NO: 9899 - DNA, 561 bp, Saccharomyces cerevisiae
atgggtatcgatcacacttccaagcaacacaagagatctggtcacagaactgctccaaagtctgacaatgtctacttgaaattgttagtcaaattatacactttcttagctcgtcgtactgatgctccattcaacaaggttgtcttgaaggctttgttcttgtctaagatcaacagaccacctgtttctgtctctagaattgctagagctttgaagcaagaaggtgctgctaacaagactgttgtcgttgttggtactgttactgacgatgccagaatctttgaattcccaaagaccactgttgctgctttgagattcactgctggtgccagagccaagattgttaaggctggtggtgaatgtatcactttggatcaattagctgtcagagctccaaagggtcaaaacactttgatcttgagaggtccaagaaactccagagaagctgtcagacacttcggtatgggtccacacaagggtaaggctccaagaatcttgtccaccggtagaaagttcgaaagagctagaggtagaagaagatctaagggtttcaaggtgtaa

SEQ ID NO: 9900 - DNA, 561 bp, Artificial Sequence
  Description of Artificial Sequence: Synthetic polynucleotide
atgggtatcgatcacacttccaagcaacacaagagatctggtcacagaactgctccaaagtctgacaatgtctacttgaaattgttagtcaaattatacactttcttagctcgtcgtactgatgctccattcaacaaggttgtcttgaaggctttgttcttgtctaagatcaacagaccacctgtttctgtctctagaattgctagagctttgaagcaagaaggtgctgctaacaagactgttgtcgttgttggtactgttactgacgatgccagaatctttgaattcccaaagaccactgttgctgctttgagattcactgctggtgccagagccaagattgttaaggctggtggtgaatgtatcactttggatcaattagctgtcagagctccaaagggtcaaaacactttgatcttgagaggtccaagaaactccagagaagctgtcagacacttcggtatgggtccacacaagggtaaggctccaagaatcttgtccaccggtagaaagttcgaaagagctagaggtagaagaagatctaagggtttcaaggtgtga

SEQ ID NO: 9901 - DNA, 1506 bp, Saccharomyces cerevisiae
atgttgaacattcccataattgctaactccaagaggttcctgttctcaaaggatcacgaagcgcaatctacgagagatcacgatgtggagctggagacaagggagggcccaagttcaggatataatccaaacttcaatgcagcggacgcgattttgaaaaagaacagcgatcaagtagatcttgacgttaataagttaacgaacgtcacctcaagagttttaaacaccccagaggcctctttgatttatgatgatgacagagagttcccagatggtgggttaaaagcatggctggtagtatttggtgcgtttatgggactggtcccggtttttggcttaatcaactccttaggggctattgaatcatatatctctaaacatcaattggcaaatatatcttcttcaacaatatcttggattttttccctatacttagctatcagctttttaagctgtatattatccggtggctattttgatagaaatggtagtattggtttgatgtgcacaggtacagtcatatatgctggaggactattcgcattggcaaattgtaagtccgtatggcagttcattttggcattttctgtgtgctctggacttgggacgggaattttaatgactcctctgataggaactgttgcaacctggtttttaaaaagaaggggtatagcaacatctataagtaccatggggggttcaatagggggtatagttttccctattatgctgagaaagttatataaagaagtgggctttcaatgggccattagaatcctatcattcatttgtttaacatgcctcatttgtgcttcagttttggctagagaaagaactaaaccggtcgttcaaccattcaaatccaaggcggaagtagcaaagtggtacatttcctctgtgttcaattggagatattttttggaaggaaaattcttgttcgtcgcaataggcgcttcttttgcagaaagttccctaacttcatgcgctacatatttagcatcttattctatgacaagaggaaacacagaaaatgttgcttataccatgatcactgcttcgaatgctgttggtatacttggaaggtatataccaggctattttgcggataagttcatcgggagattcaatgtagaaattatcaccatttcaatggctgccttatttaattttgtcatgtggctgccatttggcggtaatacaaaggtactttgggcgtacgtttgtttgtgggggttttcgacgggttctatcctatcactgacacccgtttgcatcgggcagatatctaaaactactgattttggtaaacgttatgcaacggtatatctattgcaagcgttggtaacgattccggttttacctatcggcggtaccttaatcggtaaaggtacagttgcaaattataaccattttataatattcaattcagcgttaatggcggcaggtgcggcatgttatataatatcaaggcatatttgcgttggtgcgaagctttgtaagttttaa

SEQ ID NO: 9902 - DNA, 1506 bp, Artificial Sequence
  Description of Artificial Sequence: Synthetic polynucleotide
atgttgaacattcccataattgctaactccaagaggttccttttctccaaggatcacgaagcgcaatctacgagagatcacgatgtggagttagagacaagggagggcccaagtagtggatataatccaaacttcaatgcagcggacgcgattttgaaaaagaacagcgatcaagtagatcttgacgttaataagttaacgaacgtcacctccagagttttaaacaccccagaggcctctttgatttatgatgatgacagagagttcccagatggtgggttaaaagcatggttggtagtatttggtgcgtttatgggattagtcccggtttttggcttaatcaactccttaggggctattgaaagttatatctctaaacatcaattggcaaatatatcttcttctacaatatcttggattttttccttgtacttagctatcagctttttaagctgtatattatccggtggctattttgatagaaatggtagtattggtttgatgtgcacaggtacagtcatatatgctggaggattattcgcattggcaaattgtaagtccgtatggcagttcattttggcattttctgtgtgctctggacttgggacgggaattttaatgactcctttgataggaactgttgcaacctggtttttaaaaagaaggggtatagcaacatctataagtaccatggggggttccatagggggtatagttttccctattatgttgagaaagttatataaagaagtgggctttcaatgggccattagaatcttatctttcatttgtttaacatgcctcatttgtgcttctgttttggctagagaaagaactaaaccggtcgttcaaccattcaaatccaaggcggaagtagcaaagtggtacatttcctctgtgttcaattggagatattttttggaaggaaaattcttgttcgtcgcaataggcgcttcttttgcagaaagttccttgacttcttgcgctacatatttagcatcttattctatgacaagaggaaacacagaaaatgttgcttataccatgatcactgcttctaatgctgttggtatacttggaaggtatataccaggctattttgcggataagttcatcgggagattcaatgtagaaattatcaccatttccatggctgccttatttaattttgtcatgtggttaccatttggcggtaatacaaaggtactttgggcgtacgtttgtttgtgggggttttctacgggttctatcttatctttaacacccgtttgcatcgggcagatatctaaaactactgattttggtaaacgttatgcaacggtatatcttttgcaagcgttggtaacgattccggttttacctatcggcggtaccttaatcggtaaaggtacagttgcaaattataaccattttataatattcaattctgcgttaatggcggcaggtgcggcatgttatataatatctaggcatatttgcgttggtgcgaagctttgtaagttttga

SEQ ID NO: 9903 - DNA, 309 bp, Saccharomyces cerevisiae
atgtcttttagaaagaaaaaactcaaacctccagcgggtagtcaatttattataaacgactccataatgagctatattgaccgcacgaaaacactaataaggatgattggatgcaagaaccagtacataaaagcacgtatgaaagataagaccttcttctatacgaagcaattccgtacagccaaaaacaaatttttctttcatctgtaccattgggaggccactcatattaacgttgaccactatatatgtacatgtcatcccattttttggggctctataggtcagaaactcaggagatccgcctga

SEQ ID NO: 9904 - DNA, 309 bp, Artificial Sequence
  Description of Artificial Sequence: Synthetic polynucleotide
atgtcttttagaaagaaaaaactcaaacctccagcgggtagtcaatttattataaacgactccataatgagctatattgaccgcacgaaaacattaataaggatgattggatgcaagaaccagtacataaaagcacgtatgaaagataagaccttcttctatacgaagcaattccgtacagccaaaaacaaatttttctttcatctttaccattgggaggccactcatattaacgttgaccactatatatgtacatgtcatcccattttttggggctctataggtcagaaactcaggagatccgcctga

SEQ ID NO: 9905 - DNA, 1938 bp, Saccharomyces cerevisiae
atgtctgatgaagataacaattatgacgacttcatgttatcggatgacgaaggcatggagtcaattgaaatggaggaagaaaccgatgatgaagacaaacaaaacattgaaataaatgaagacaatagtcaggatgatcaagatcgaggagcggcacgacataagcaacatgaacaaggcaccttcgagaaacatgacagagtagaagatatttgtgaaagaatctttgagcaaggccaagctctcaaagaagacgaacgatataaagaggctcgcgatttatttttaaagatatattacaaggaagaattttcatctgacgaaagtatagaaaggctcatgacatggaaatttaaatcacttattgagatattacgtttaagagccctacaactctattttcagaaaaacggtgcacaggatttagttctacaaattttagaagacacggcaactatgtcggtttttttacaaagaatagactttcaaattgatggaaatatatttgaattactttctgatacttttgaggtattggcacccaagtgggaaagagtattcttgttcgacatcgagaaagttgatagggaaaatatgatctgcaaaattgatttccaaaaaaacttcatggatcagtttcaatggattttaagaaagcctggcaaggattgtaaactccaaaatctccagcgtataattagaaaaaagatatttattgccgttgtttggtatcaaaggttaaccatggggaatgtattcaccccggaaatttcttcccaaatagagattcttgtgaaagataatgaatgctcttcttttgaggaaaataatgatttggaaagtgtatctatgttactgcagtattacatattggagtatatgaacactgcacgaataaacaatagaaggttgtttaagaagtgcattgacttttttgaaatgttgatatctaagtcgcttactttctcacaagaatctggactgatggtaatattatatacctctaagattgtattcattttagactctgattcagagaatgatttatcctttgcgctgatgagatattatgatcggaaagaagagctaaaaaatatgttcctctatatcttgaaacacttggaagagatgggaaaacttcgggagagggatattacctctttgtttcacaagttcattcttagcggcttcattttcacgagcatgattctagaagcaattagcacagacaagattaatccttttggtttcgaacaagtgaagattgcgctaggcagccctattgttaacgtattagaagatgtctacaggtgcttcgcacaactggaactaagacagctgaatgcaagtatatctcttattcctgaattgtccgtagtactaagtggaattattcaagatatttactatctggcgcagacattaaagttgtggagaaaaattgcacgattatactcctgtatctccataagtgacattataagtatgctgcaaataagtgatgacaatgaaatgacaagagatgatttgctaacaattttaatgaggtcaataatgaaaaatagatcggttgtgtattttaagttagatttgacaagtgatttagtctatttcggagacgagaataaagtcatgctaccgagatgttctaaagaagaatttcgtcttatgatctctcccaaggatgaagaaaccactgaaaaggccaggctaatagattttgagtacgttaacgatgtcgcgatttataataacccaacaagaataagaaccaaatcctctaaagaatttttcaatacattaagaaaatctagggaaactgtaaaattaccgagggtaagcaaccagtcgaatgaagatacttttctaccatcgtatatgaagttttccaacaagtacctcgagctgtgcaaactggcctctaacaatctggaatag

SEQ ID NO: 9906 - DNA, 1938 bp, Artificial Sequence
  Description of Artificial Sequence: Synthetic polynucleotide
atgtctgatgaagataacaattatgacgacttcatgttaagtgatgacgaaggcatggagtctattgaaatggaggaagaaaccgatgatgaagacaaacaaaacattgaaataaatgaagacaatagtcaggatgatcaagatagaggagcggcaagacataagcaacatgaacaaggcaccttcgagaaacatgacagagtagaagatatttgtgaaagaatctttgagcaaggccaagctctcaaagaagacgaaagatataaagaggctcgcgatttatttttaaagatatattacaaggaagaattttcttctgacgaaagtatagaaaggctcatgacatggaaatttaaatctcttattgagatattacgtttaagagccttgcaactctattttcagaaaaacggtgcacaggatttagttttgcaaattttagaagacacggcaactatgtctgtttttttacaaagaatagactttcaaattgatggaaatatatttgaattactttctgatacttttgaggtattggcacccaagtgggaaagagtattcttgttcgacatcgagaaagttgatagggaaaatatgatctgcaaaattgatttccaaaaaaacttcatggatcagtttcaatggattttaagaaagcctggcaaggattgtaaactccaaaatctccagcgtataattagaaaaaagatatttattgccgttgtttggtatcaaaggttaaccatggggaatgtattcaccccggaaatttcttcccaaatagagattcttgtgaaagataatgaatgctcttcttttgaggaaaataatgatttggaaagtgtatctatgttattgcagtattacatattggagtatatgaacactgcaagaataaacaatagaaggttgtttaagaagtgcattgacttttttgaaatgttgatatctaagtctcttactttctctcaagaatctggattaatggtaatattatatacctctaagattgtattcattttagactctgattctgagaatgatttatcctttgcgttaatgagatattatgataggaaagaagagttgaaaaatatgttcctctatatcttgaaacacttggaagagatgggaaaacttcgtgagagggatattacctctttgtttcacaagttcattcttagcggcttcattttcacgagcatgattttggaagcaattagcacagacaagattaatccttttggtttcgaacaagtgaagattgcgttgggcagccctattgttaacgtattagaagatgtctacaggtgcttcgcacaattggaattgagacagttgaatgcaagtatatctcttattcctgaattgtccgtagtattgagtggaattattcaagatatttactatttggcgcagacattaaagttgtggagaaaaattgcaagattatactcctgtatctccataagtgacattataagtatgttacaaataagtgatgacaatgaaatgacaagagatgatttgttgacaattttaatgaggtctataatgaaaaatagatctgttgtgtattttaagttagatttgacaagtgatttagtctatttcggagacgagaataaagtcatgttaccgagatgttctaaagaagaatttcgtcttatgatctctcccaaggatgaagaaaccactgaaaaggccaggttgatagattttgagtacgttaacgatgtcgcgatttataataacccaacaagaataagaaccaaatcctctaaagaatttttcaatacattaagaaaatctagggaaactgtaaaattaccgagggtaagcaaccagtctaatgaagatacttttttaccatcttatatgaagttttccaacaagtacctcgagctctgcaaattggcctctaacaatttggaatga

SEQ ID NO: 9907 - DNA, 1149 bp, Saccharomyces cerevisiae
atggcaagtaaccagcacataggagcttcaaacctaaatgagaatgaggctatattaaccaaccgcgttgctgagctggaaaggcgtatgtcgatgtttgagggtatatttcacgcgttaagtaaccgtctcgatcttcactttaaaaaatatgatgtagtggtaaactcccaacagcaacaaatcaacgaactgaccgcgtttttatcaacattgctgaatgaccaacaacgccacgctgaaattctcagtgaaaaattaagcggaacgttgcatggggtgtcagctacgtcaatatccttaagccaaactcttgacccacaaggcttcactgatggaactacggcaccaggagctcctaggaattatacttcagtgcctatgaataatgatcaaactgctcatccgcaaaatgaaggagctgttagtaatgaaacactttttgaggacattttgaatggaaattcacaagaaaatgataagagtcaacaacaaactaacagctcaaattctataagccaagaaaataatagcaccaacccttcagtggacactcggttcaacaagccgcaaaattataattccaatttagtcccatccttggaagagtattcagcaaatccacctaacaatgatggtggccaaagtcaaggactgtacataagcagcaactcttctcaatcacggcagtctcctaatctccagaaagtttctcctaaccatgaaaatgcggttgaatcaaatgcacaagagagcgtgccgacatttgaggaggaacagtatgagactaaaacaggattgaaacggaaacgaatagtctgcacaagacccttcgaatttatcaagtcaccacactctgtgatggaggtttggaaggagtatacagaaggtgttaacgggcagccttctataaggaaaatggaagctctttatcaaacggcatggaggcgagatccagcagtaaataaaagatattcgagaagaaaggttctttggaaagccattcaaactggccttaatcgtgggtattcattaaactatgttgttgaaatattagaaaactcaagatatgttaatgataaacagaaggttaaacaacctattggttggttatgccacagttctcatattccagagactttgaagtga

SEQ ID NO: 9908 - DNA, 1149 bp, Artificial Sequence
  Description of Artificial Sequence: Synthetic polynucleotide
atggcaagtaaccagcacataggagcttctaacttgaatgagaatgaggctatattaaccaaccgcgttgctgagttagaaaggcgtatgtccatgtttgagggtatatttcacgcgttaagtaaccgtctcgatcttcactttaaaaaatatgatgtagtggtaaactcccaacagcaacaaatcaacgaattgaccgcgtttttatctacattgttgaatgaccaacaacgccacgctgaaattctcagtgaaaaattaagcggaacgttgcatggggtgtctgctacgtctatatccttaagccaaactcttgacccacaaggcttcactgatggaactacggcaccaggagctcctaggaattatacttctgtgcctatgaataatgatcaaactgctcatccgcaaaatgaaggagctgttagtaatgaaacactttttgaggacattttgaatggaaattctcaagaaaatgataagagtcaacaacaaactaacagcagtaattctataagccaagaaaataatagcaccaacccttctgtggacactagattcaacaagccgcaaaattataattccaatttagtcccatccttggaagagtattctgcaaatccacctaacaatgatggtggccaaagtcaaggattatacataagcagcaactcttctcaaagtaggcagtctcctaatctccagaaagtttctcctaaccatgaaaatgcggttgaaagtaatgcacaagagagcgtgccgacatttgaggaggaacagtatgagactaaaacaggattgaaaagaaaaagaatagtctgcacaagacccttcgaatttatcaagtctccacactctgtgatggaggtttggaaggagtatacagaaggtgttaacgggcagccttctataaggaaaatggaagctctttatcaaacggcatggaggagagatccagcagtaaataaaagatattctagaagaaaggttctttggaaagccattcaaactggccttaatcgtgggtattctttaaactatgttgttgaaatattagaaaactctagatatgttaatgataaacagaaggttaaacaacctattggttggttatgccacagttctcatattccagagactttgaagtga

SEQ ID NO: 9909 - DNA, 1755 bp, Saccharomyces cerevisiae
atgggggcaaagagtgtaacagcctcttcttcaaagaagattaaaaaccggcataatgggaaagtgaaaaagagcaagaaaatcaagaaagtacggaaaccacagaagtctatatccttgaacgacgaaaacgaagtagagattttacctagtcgtaatgagcaagagacaaataaattacctaaagatcacgtcacggcggatggaattcttgtattagaacataaatctgatgatgatgaaggattcgatgtctacgatggacatttcgataaccctactgatattccctcgactactgaagaaagtaaaacgccttcattagcagtgcacggggatgagaaggatcttgctaacaatgatgattttatctctctttctgctagttctgaggatgagcaagccgaacaggaagaggagagggagaaacaagaattagaaattaaaaaagaaaagcaaaaggaaatccttaatactgattatccatggattttaaatcatgatcactccaaacagaaagaaatctcggactggctaacctttgaaatcaaggattttgttgcctatatctcaccaagtcgtgaagaaattgaaattcgtaatcaaaccataagtacaataagagaggctgtcaaacagttatggccagatgctgatttgcacgtgtttggatcatattctaccgatttgtatttgcctggttccgatattgattgcgtggtaacgagcgaacttggtggtaaggaaagtaggaataacttgtattcgttagcaagccatttaaaaaaaaaaaatttggcaacagaggttgaagttgtcgccaaagctcgcgttccaatcatcaagtttgttgagccacattcagggatccacatagatgtttcatttgagagaacaaatggtattgaagcagcaaagcttattagagagtggttggacgatacccccggcctgagagaattagtccttatcgtaaaacaattcctacacgcaagaagactaaataatgtgcataccggtggtcttggtgggtttagtattatatgtcttgtcttttcctttttgcatatgcacccacgtataataactaacgaaatagatccaaaggacaacttgggtgtgctcctgatagagttttttgaactttatgggaaaaattttggttatgatgatgttgcactgggatcatcggatggatatccagtatactttccaaaatcgacatggagtgctattcagcctattaaaaatccattttcattggccattcaagatccaggtgatgaatcaaataacatcagtcgagggtcctttaacattcgagatattaaaaaggcatttgctggtgcttttgatctgttgacgaatagatgttttgaattacattcagcaacttttaaggatcgattggggaaaagtatattgggaaacgtgatcaaatatcgtggaaaggcaagagatttcaaggatgaaagaggtctagtactgaataaggctattattgaaaatgaaaactatcacaagaaacgtagcagaataattcatgatgaagattttgccgaagatacagttacctccacagccaccgctaccacaacagatgatgattatgaaataacgaacccacctgctaagaaggctaaaatagaagaaaaacctgaaagtgaaccggccaagagaaatagtggagagacatatatcactgtctctagcgaagatgatgatgaagatggatataatccttataccctttaa

SEQ ID NO: 9910 - DNA, 1755 bp, Artificial Sequence
  Description of Artificial Sequence: Synthetic polynucleotide
atgggggcaaagagtgtaacagcctcttcttccaagaagattaaaaacagacataatgggaaagtgaaaaagagcaagaaaatcaagaaagtaagaaaaccacagaagtctatatccttgaacgacgaaaacgaagtagagattttacctagtcgtaatgagcaagagacaaataaattacctaaagatcacgtcacggcggatggaattcttgtattagaacataaatctgatgatgatgaaggattcgatgtctacgatggacatttcgataaccctactgatattccctccactactgaagaaagtaaaacgccttctttagcagtgcacggggatgagaaggatcttgctaacaatgatgattttatctctctttctgctagttctgaggatgagcaagccgaacaggaagaggagagggagaaacaagaattagaaattaaaaaagaaaagcaaaaggaaatccttaatactgattatccatggattttaaatcatgatcactccaaacagaaagaaatcagtgactggttgacctttgaaatcaaggattttgttgcctatatctctccaagtcgtgaagaaattgaaattcgtaatcaaaccataagtacaataagagaggctgtcaaacagttatggccagatgctgatttgcacgtgtttggatcctattctaccgatttgtatttgcctggttccgatattgattgcgtggtaacgagcgaacttggtggtaaggaaagtaggaataacttgtattctttagcaagccatttaaaaaaaaaaaatttggcaacagaggttgaagttgtcgccaaagctcgcgttccaatcatcaagtttgttgagccacattctgggatccacatagatgtttcttttgagagaacaaatggtattgaagcagcaaagcttattagagagtggttggacgatacccccggcttaagagaattagtccttatcgtaaaacaattcttgcacgcaagaagattgaataatgtgcataccggtggtcttggtgggtttagtattatatgtcttgtcttttcctttttgcatatgcacccacgtataataactaacgaaatagatccaaaggacaacttgggtgtgctcttaatagagttttttgaactttatgggaaaaattttggttatgatgatgttgcattgggatcttctgatggatatccagtatactttccaaaatctacatggagtgctattcagcctattaaaaatccattttctttggccattcaagatccaggtgatgaaagtaataacatcagtagagggtcctttaacattagagatattaaaaaggcatttgctggtgcttttgatttattgacgaatagatgttttgaattacattctgcaacttttaaggatagattggggaaaagtatattgggaaacgtgatcaaatatcgtggaaaggcaagagatttcaaggatgaaagaggtttagtattgaataaggctattattgaaaatgaaaactatcacaagaaacgtagcagaataattcatgatgaagattttgccgaagatacagttacctccacagccaccgctaccacaacagatgatgattatgaaataacgaacccacctgctaagaaggctaaaatagaagaaaaacctgaaagtgaaccggccaagagaaatagtggagagacatatatcactgtctctagcgaagatgatgatgaagatggatataatccttataccctttga

SEQ ID NO: 9911 - DNA, 609 bp, Saccharomyces cerevisiae
atgacaacattgatgggaaagtttaaacttactgggcgctcccctctgtttgtacttcaaccaatgttgcactgcaagaaacaacagttcgttgaagaggcagtcagattgattagtaataaaaagatcggaaagaaatctgacttcgtccaggcaagaaactgggtaggagcacttaacgtaacgggcttgcccttaaatcaatttattttacgttacgatagagccagcgggccaggaggccaaaacgttaataaggtaaatagtaaatgtactttgacactttctggtttatcaaactgtgcttggattcctcaggaagtgagaaacatcttaagtagcggcaggtttcgatactacgctaagggcagcgattctatagtaattcaatctgatgaaactaggtcaagggaaaccaacaaattaaaatgcttcgagaagttggttcaagaaattcggcaaacgtgccaatttcctaatgataccactgctgagacctcaaagaaatggaataaaataaaagagaaagccaacaaagagcgacttcttgacaaaaaagttcacagcgataaaaagaaaaacagaagtaaaattaaattcaattattaa

SEQ ID NO: 9912 - DNA, 609 bp, Artificial Sequence
  Description of Artificial Sequence: Synthetic polynucleotide
atgacaacattgatgggaaagtttaaacttactgggcgctcccctttatttgtacttcaaccaatgttgcactgcaagaaacaacagttcgttgaagaggcagtcagattgattagtaataaaaagatcggaaagaaatctgacttcgtccaggcaagaaactgggtaggagcacttaacgtaacgggcttgcccttaaatcaatttattttacgttacgatagagccagcgggccaggaggccaaaacgttaataaggtaaatagtaaatgtactttgacactttctggtttatctaactgtgcttggattcctcaggaagtgagaaacatcttaagtagcggcaggtttagatactacgctaagggcagcgattctatagtaattcaatctgatgaaactaggagtagggaaaccaacaaattaaaatgcttcgagaagttggttcaagaaattagacaaacgtgccaatttcctaatgataccactgctgagacctccaagaaatggaataaaataaaagagaaagccaacaaagagaggcttcttgacaaaaaagttcacagcgataaaaagaaaaacagaagtaaaattaaattcaattattga

SEQ ID NO: 9913 - DNA, 1968 bp, Saccharomyces cerevisiae
atgaagggcgtaaaaaaggaaggatggatatcttataaagttgatggattgttttcgttcttatggcaaaagagatacttggtactgaatgattcgtatttagcattttacaaaagtgataagtgcaatgaggaaccagtcttatctgtgcctttgactagtataacaaatgttagcagaatacaattgaaacaaaattgttttgagattcttcgggcaacagatcaaaaagagaacatatcccccataaactcctacttttatgaatcaaattccaaaagatcgatattcatttccacaagaaccgaacgggatttgcatggctggcttgatgccatttttgccaaatgtcctctccttagtggtgtttcatcaccaacaaattttacacacaaagtacacgttgggttcgacccaaaagtgggaaactttgttggagtacctgatagttgggctaaactactacaaacctcagaaattacgtacgacgattggaacagaaactcaaaagctgttattaaagcactgcaattttatgaagattacaatggactggacacaatgcaattcaatgatcacctcaacacaagcttagacttgaaacctttaaaaagtccgacaaggtatattataaacaagaggactaattccatcaagagatcagtaagtaggacgctccgaaaaggcaaaacagattccattttacccgtctatcaatcagaacttaaaccattcccaaggcctagtgatgatgattataagtttaccaacatagaggacaataaagtacgcgaagaaggcagggtgcatgttagtaaagaaagcacggcagattcccagacaaagcagttaggaaagaaggaacagaaagtcattcaaagccatctgcgaaggcatgataataattcaacatttagacctcatcgactagcaccatctgcacctgctacaaaaaatcatgatagtaaaactaaatggcataaggaggatctccttgaacttaagaataatgatgattcgaatgaaataataatgaagatgaaaactgttgcaattgatgtaaacccaagaccgtatttccaactggtagaaaaggctggtcaaggagcaagtggtgcagtatacctgtcaaagcgaataaaattacctcaagaaaatgacccgagattcttgaaatcacattgccaccgagtcgtaggcgaaagagtggccattaagcagatacgtttatctgaacaaccaaagaaacaattgattatgaatgaactcctagtgatgaatgattcgcgccaagaaaatatcgttaatttccttgaagcctatattattgatgacgaagagttatgggtgataatggagtacatggaaggtggctgcttaacagatatattggatgctgtagcaaggagcaataccggtgagcactcatcgccgttaaacgaaaaccaaatggcatatatagtaaaagagacgtgccaaggtttgaagtttttgcataacaagaaaattatccatcgagatatcaaatctgataatatccttctgaattcccaagggttagtgaaaattacagacttcggtttttgtgtggaattaacagaaaaaagaagcaagcgtgccacaatggtaggtactccatattggatggcacctgaaatagtgaatcaaaagggatatgatgaaaaagtcgacgtttggtctctagggataatgcttattgagatgatagaaggtgaaccgccttacctaaatgaggatcctttgaaggcgctgtatctgatagctaacaacggttcaccaaaattgcgtcatccagagtcagtgtccaagcaaaccaaacaattcttagatgcctgtttgcaagtgaatgtcgaatcaagagcatccgtgagaaaactactaacgtttgaatttttgtcaatggcatgcagccctgagcagctcaaagtatccttaaagtggcattga

SEQ ID NO: 9914 - DNA, 1968 bp, Artificial Sequence
  Description of Artificial Sequence: Synthetic polynucleotide
atgaagggcgtaaaaaaggaaggatggatatcttataaagttgatggattgttttctttcttatggcaaaagagatacttggtattgaatgattcttatttagcattttacaaaagtgataagtgcaatgaggaaccagtcttatctgtgcctttgactagtataacaaatgttagcagaatacaattgaaacaaaattgttttgagattcttcgtgcaacagatcaaaaagagaacatatcccccataaactcctacttttatgaaagtaattccaaaagaagtatattcatttccacaagaaccgaaagagatttgcatggctggcttgatgccatttttgccaaatgtcctctccttagtggtgtttcttctccaacaaattttacacacaaagtacacgttgggttcgacccaaaagtgggaaactttgttggagtacctgatagttgggctaaattattacaaaccagtgaaattacgtacgacgattggaacagaaactccaaagctgttattaaagcattacaattttatgaagattacaatggattggacacaatgcaattcaatgatcacctcaacacaagcttagacttgaaacctttaaaaagtccgacaaggtatattataaacaagaggactaattccatcaagagatctgtaagtaggacgctcagaaaaggcaaaacagattccattttacccgtctatcaaagtgaacttaaaccattcccaaggcctagtgatgatgattataagtttaccaacatagaggacaataaagtacgcgaagaaggcagggtgcatgttagtaaagaaagcacggcagattcccagacaaagcagttaggaaagaaggaacagaaagtcattcaaagccatttgagaaggcatgataataattctacatttagacctcatagattagcaccatctgcacctgctacaaaaaatcatgatagtaaaactaaatggcataaggaggatctccttgaacttaagaataatgatgattctaatgaaataataatgaagatgaaaactgttgcaattgatgtaaacccaagaccgtatttccaattggtagaaaaggctggtcaaggagcaagtggtgcagtatacctttccaagagaataaaattacctcaagaaaatgacccgagattcttgaaatctcattgccacagagtcgtaggcgaaagagtggccattaagcagatacgtttatctgaacaaccaaagaaacaattgattatgaatgaactcttggtgatgaatgattctcgccaagaaaatatcgttaatttccttgaagcctatattattgatgacgaagagttatgggtgataatggagtacatggaaggtggctgcttaacagatatattggatgctgtagcaaggagcaataccggtgagcactcttctccgttaaacgaaaaccaaatggcatatatagtaaaagagacgtgccaaggtttgaagtttttgcataacaagaaaattatccatagagatatcaaatctgataatatccttttgaattcccaagggttagtgaaaattacagacttcggtttttgtgtggaattaacagaaaaaagaagcaagcgtgccacaatggtaggtactccatattggatggcacctgaaatagtgaatcaaaagggatatgatgaaaaagtcgacgtttggtctttagggataatgcttattgagatgatagaaggtgaaccgccttacttgaatgaggatcctttgaaggcgttatatttgatagctaacaacggttctccaaaattgcgtcatccagagtctgtgtccaagcaaaccaaacaattcttagatgcctgtttgcaagtgaatgtcgaatctagagcatccgtgagaaaattattgacgtttgaatttttgtccatggcatgcagccctgagcagctcaaagtatccttaaagtggcattga

SEQ ID NO: 9915 - DNA, 1479 bp, Saccharomyces cerevisiae
atgataatgtcatcaactatgtcgacagaagccgccttggtaccgaacgaaagtgtttttgacacagtttcgtcattcaacgaagacgatgccaattatagcgttcttgatttatacgatgacgacgatgaaggggatgatagttctacagtagaacgaaaagaaatattgacaacacgtgagcttgaaaaagcaaaggcgtttaccagcttaatcatggcagatcctgagaattttgatagatatggatttagcaagaaaggatatttcattagtcaggaagaatacgacaaatggtggacagaatataatagatacaccgaaagaagaaaaaaaaagtgggagaactttcttcttaagaataagattgagctccacaatgataatcctctagtatatcctgcaaggacagatgaattgtcaaaatttgttagaaaaggtataccagcagaatggagagggaatgcctggtggtattttgctggtggacaacgacaattagacgcaaatgttggcgtttatgatagactgaaaagtgactgtcgcgagggtgccgtatctggtaaagatatggaagctatagaacgggatctttatcgaacgtttcccgataatatacatttccataaggagtccttccaaaatggagagccggcgatcatccgatcattgcgtcgagtattaatggccttttctgtttatgacaagactattggatactgccaatcgatgaattttctcgttggattgctattattgttcatggaagaagagaaagcattttggatgctggttattattaccggtaagtatttacctggcgtgtatgaatcagacttagagggtgcgaacgtggatcaaggggtgttggtgttatgtatcaaggaatatttacccgagatatggtcacacattgagtcatcgtatatgaatggcaatggcagcactgaccagatatcagggccagcatcgggggaagaatatctctgcaggctgcctacgctgacgctgtgtacggcaagttggtttatgagctgttttgtgggcgtggtgcccatcgaaacgaccctgagaatatgggactgtttattctatgaagagtctcattttttatttaaagtggctttggggatactgaaattgagcgaaagcgagtttttggagagtaaaagccagaaactgtttagacagtactcttcgtacaccttcggtggtagtaatgactctgattcaactttcaaaagattaaagaacaagattaagacgcaggaagaggcagatatggagattttgcaagtgattcaaaatttcccaaaaagattgctcaatccgaatgatatctttgagaaagtcctgatgaagaagaaggttgcgttgaatggtattacccaggaaaagattgatcgcggtagagagtatgtggcgatggcgagaaatagacaaagggcgagtagccgcccaaaggaaagaagaaaatag

SEQ ID NO: 9916 - DNA, 1479 bp, Artificial Sequence
  Description of Artificial Sequence: Synthetic polynucleotide
atgataatgtcttctactatgtctacagaagccgccttggtaccgaacgaaagtgtttttgacacagtttcttctttcaacgaagacgatgccaattatagcgttcttgatttatacgatgacgacgatgaaggggatgatagttctacagtagaaagaaaagaaatattgacaacacgtgagcttgaaaaagcaaaggcgtttaccagcttaatcatggcagatcctgagaattttgatagatatggatttagcaagaaaggatatttcattagtcaggaagaatacgacaaatggtggacagaatataatagatacaccgaaagaagaaaaaaaaagtgggagaactttcttcttaagaataagattgagctccacaatgataatcctttggtatatcctgcaaggacagatgaattgagtaaatttgttagaaaaggtataccagcagaatggagagggaatgcctggtggtattttgctggtggacaaagacaattagacgcaaatgttggcgtttatgatagattgaaaagtgactgtcgcgagggtgccgtatctggtaaagatatggaagctatagaaagagatctttatagaacgtttcccgataatatacatttccataaggagtccttccaaaatggagagccggcgatcatcagaagtttgcgtcgtgtattaatggccttttctgtttatgacaagactattggatactgccaatctatgaattttctcgttggattgttattattgttcatggaagaagagaaagcattttggatgcttgttattattaccggtaagtatttacctggcgtgtatgaaagtgacttagagggtgcgaacgtggatcaaggggtgttggtgttatgtatcaaggaatatttacccgagatatggtctcacattgagagttcttatatgaatggcaatggcagcactgaccagataagcgggccagcatctggggaagaatatctctgcaggttgcctacgttaacgttgtgtacggcaagttggtttatgagctgttttgtgggcgtggtgcccatcgaaacgaccttgagaatatgggactgtttattctatgaagagtctcattttttatttaaagtggctttggggatattgaaattgagcgaaagcgagtttttggagagtaaaagccagaaattatttagacagtactcttcctacaccttcggtggtagtaatgactctgattctactttcaaaagattaaagaacaagattaagacgcaggaagaggcagatatggagattttgcaagtgattcaaaatttcccaaaaagattgctcaatccgaatgatatctttgagaaagtcttgatgaagaagaaggttgcgttgaatggtattacccaggaaaagattgatcgcggtagagagtatgtggcgatggcgagaaatagacaaagggcgagtagccgcccaaaggaaagaagaaaatga

SEQ ID NO: 9917 - DNA, 639 bp, Saccharomyces cerevisiae
atgagcacatccgccagcggtccagaacacgagttcgttagtaaattcttgaccttagccactttaactgaaccgaagctaccaaaaagctatactaaacctctgaaggatgttaccaatttgggtgtcccgttgcctactttgaagtataaatataagcagaatcgtgccaagaagttaaaactgcaccaagatcagcaaggtcaagacaacgccgccgtccacttaaccttaaagaaaattcaagctcccaagttctccatcgagcatgatttcagcccatcagatactatcttacaaataaaacagcacttgatcagcgaggaaaaggcctcccacataagcgagataaaactgcttttgaagggcaaagtcctccacgataacctgttcttatcggatttgaaggtcacgcctgccaattccacaatcacagtcatgattaagccgaatccgactatatctaaggaacccgaagccgagaaatccactaactcccctgctcctgctcctccacaggaactcactgtgccctgggatgatatcgaggctcttctgaagaacaatttcgagaacgatcaggctgcggttaggcaagtcatggagcgtctacaaaaaggctggtctctggccaaataa

SEQ ID NO: 9918 - DNA, 639 bp, Artificial Sequence
  Description of Artificial Sequence: Synthetic polynucleotide
atgagcacatccgccagcggtccagaacacgagttcgttagtaaattcttgaccttagccactttaactgaaccgaagttaccaaaaagctatactaaacctttgaaggatgttaccaatttgggtgtcccgttgcctactttgaagtataaatataagcagaatcgtgccaagaagttaaaattacaccaagatcagcaaggtcaagacaacgccgccgtccacttaaccttaaagaaaattcaagctcccaagttctccatcgagcatgatttcagcccaagtgatactatcttacaaataaaacagcacttgatcagcgaggaaaaggcctcccacataagcgagataaaattacttttgaagggcaaagtcctccacgataacttgttcttaagtgatttgaaggtcacgcctgccaattccacaatcacagtcatgattaagccgaatccgactatatctaaggaacccgaagccgagaaatccactaactcccctgctcctgctcctccacaggaactcactgtgccctgggatgatatcgaggctcttttgaagaacaatttcgagaacgatcaggctgcggttaggcaagtcatggagcgtttacaaaaaggctggtctttggccaaatga

SEQ ID NO: 9919 - DNA, 714 bp, Saccharomyces cerevisiae
atgtgcgatagccatcaaaaggaagaagataacgcaaatacgagcgaaagggcgttattttttaattaccatgagttttcgtattcattctacgaagacctcggttccgaagacgctaaacccacagagcacgacgaagaccacaaattgtgtattacacatttcccgaatgtgtatgctgctcggggctctgccgagttccaggtgacccgggtggtacgagtgccccggcggttcgatgagtctcgcagcagccttgaaacgccacaatttagtacacagcttcccggtagcgagccggcggcaatcgtgggcgacgatggcactagctttgtgcggtgcgggcgttacgacattggggatcacgtgtttggctgctcctccgtctcgcctctgtcagaatatcttagtgcggcagagctcgcggaggttgtgcaccgggtaaacggattcttgctgcgtgaagaaggtgaggtgttcgggtggcgtaacttaagtggcctgttgctcgatatgcttacgggcggtctgtggagctgggttttggggccccttctttctagacctgtgtttcaggagtctctcgcgttagagcagtacgtggcgcagctaaactcgccgggaggtctgcttcacgagcgcggtgtgcgcctagtattgccccgacggtccgggtgcctatccctagatttcgtcgtgccccgacccaaatag

SEQ ID NO: 9920 - DNA, 714 bp, Artificial Sequence
  Description of Artificial Sequence: Synthetic polynucleotide
atgtgcgatagccatcaaaaggaagaagataacgcaaatacgagcgaaagggcgttattttttaattaccatgagttttcttattctttctacgaagacctcggttccgaagacgctaaacccacagagcacgacgaagaccacaaattgtgtattacacatttcccgaatgtgtatgctgctagaggctctgccgagttccaggtgaccagagtggtaagagtgccccgtagattcgatgagtctcgcagcagccttgaaacgccacaatttagtacacagcttcccggtagcgagccggcggcaatcgtgggcgacgatggcactagctttgtgcgctgcgggcgttacgacattggggatcacgtgtttggctgctcctccgtctctcctttatctgaatatcttagtgcggcagagctcgcggaggttgtgcacagagtaaacggattcttgttacgtgaagaaggtgaggtgttcgggtggcgtaacttaagtggccttttgctcgatatgcttacgggcggtttatggagctgggttttggggccccttctttctagacctgtgtttcaggagtctctcgcgttagagcagtacgtggcgcagttgaactctccgggaggtttacttcacgagcgcggtgtgcgcttggtattgccccgtcgttccgggtgcttatccttggatttcgtcgtgcccaggcccaaatga

SEQ ID NO: 9921 - DNA, 342 bp, Saccharomyces cerevisiae
atgtctgaaattcaaaacaaagctgaaactgccgcccaagatgtccaacaaaagttggaagaaaccaaagaatctttgcaaaacaagggccaagaagtaaaggaacaagctgaagcttctatcgacaacctaaaaaatgaagctactccagaagctgaacaggtgaagaaggaagaacaaaacattgctgatggtgtcgaacaaaagaagaccgaagctgccaacaaagttgaagaaactaagaagcaagcttccgccgccgtcagtgagaagaaggaaaccaagaaggaaggcggtttcttgaagaaattgaaccgtaaaattgcttccattttcaactaa

SEQ ID NO: 9922 - DNA, 342 bp, Artificial Sequence
  Description of Artificial Sequence: Synthetic polynucleotide
atgtctgaaattcaaaacaaagctgaaactgccgcccaagatgtccaacaaaagttggaagaaaccaaagaatctttgcaaaacaagggccaagaagtaaaggaacaagctgaagcttctatcgacaacttgaaaaatgaagctactccagaagctgaacaggtgaagaaggaagaacaaaacattgctgatggtgtcgaacaaaagaagaccgaagctgccaacaaagttgaagaaactaagaagcaagcttccgccgccgtcagtgagaagaaggaaaccaagaaggaaggcggtttcttgaagaaattgaaccgtaaaattgcttccattttcaactga

SEQ ID NO: 9923 - DNA, 456 bp, Saccharomyces cerevisiae
atgacgaacgatattaaggagatacaaacaatacagccgggattgtccgagattaaggagataaagggtgaactggctaatgtgaagaaaaggaaacgcaggtctaagaagattaataaattgactgatggtcaaatacgtataaatcatgtttcgtctgaaaaaaaaaggagagaattggaaagagctatatttgacgaactggtagcagtagtacctgacctgcaaccccaggaaagtcggtcagaactaatcatatacctgaaaagcttgagttacttaagttggttgtatgaaaggaatgaaaagctgagaaaacaaatcatagctaagcatgaggcaaaaaccggcagcagcagcagcagcgatcccgtacaagaacaaaatggaaacattcgggatttagtaccgaaggagttaatttgggagctgggtgatggacagagtggtcagtga

SEQ ID NO: 9924 - DNA, 456 bp, Artificial Sequence
  Description of Artificial Sequence: Synthetic polynucleotide
atgacgaacgatattaaggagatacaaacaatacagccgggattgtccgagattaaggagataaagggtgaattggctaatgtgaagaaaaggaaacgcaggtctaagaagattaataaattgactgatggtcaaatacgtataaatcatgtttcttctgaaaaaaaaaggagagaattggaaagagctatatttgacgaattggtagcagtagtacctgacttgcaaccccaggaaagtagaagtgaattgatcatatacttgaaaagcttgagttacttaagttggttgtatgaaaggaatgaaaagttgagaaaacaaatcatagctaagcatgaggcaaaaaccggcagcagcagcagcagcgatcccgtacaagaacaaaatggaaacattagagatttagtaccgaaggagttaatttgggagttaggtgatggacagagtggtcagtga

SEQ ID NO: 9925 - DNA, 1029 bp, Saccharomyces cerevisiae
atgcaatatagttcgaggttcctagaattgaatatcccggattcatttttaaatatcaataagattcctgatgctactaaatttattacagtcacttatatatgcttaactgcaacccttttctgtataaggagatccttgtacaacaagctagttcttgaagaccctaacttggactacaacttgattacttcgccgcttttgcaaatggtaccttcgcagatttggaggtaccccacctcattagttctatccaacttcatcgacactaaagcttggaaggtggtagtgaacttattgaatttgatcattggtggatccttcattgaacgcaattggaactcttccaaagaaatgttcaaatttatcatagttttaggttctcttacaaacgttctgatcatcatgctgactttgttagtatcttttttctctaataaggtaaggctggatattcccttagacgggaactacacaattttaatcggtttccctatcatttatagacagttattgcctgaaacaactataatccatctgaagacacctcaatttttggccaaaaactttaggttcaaattactacccatttttgtaatgtttacaatgacggtaacccaaataatatggtttcatcattttgctcaattgttctccatttgggttaccttttttgccagttggtcgtacttgaggtttttccagaaacttgcacccttgaattgtccctctttgccaacaactaattctcaaggtggtcaggaaatattggtcggcgatgcatctgatacttttcaattgatttacttctttcctgatctaattaagccgattttgaggccgattttcaatttcatttataatgtagttgttgtaaaatttaaagtcattaaaccttttcatgatattgatatagatattgggaacaccatcgcagaaagtagaggcgccaaaaaaattatgactgtagaagaaagacgaagacagttagctttacaagttttggaagagcgtatggtaaacccttga

SEQ ID NO: 9926 - DNA, 1029 bp, Artificial Sequence
  Description of Artificial Sequence: Synthetic polynucleotide
atgcaatatagttctaggttcttggaattgaatatcccggattcttttttaaatatcaataagattcctgatgctactaaatttattacagtcacttatatatgcttaactgcaacccttttctgtataaggagatccttgtacaacaagttggttcttgaagaccctaacttggactacaacttgattacttctccgcttttgcaaatggtaccttctcagatttggaggtaccccaccagtttagttttatccaacttcatcgacactaaagcttggaaggtggtagtgaacttattgaatttgatcattggtggatccttcattgaacgcaattggaactcttccaaagaaatgttcaaatttatcatagttttaggttctcttacaaacgttttgatcatcatgttgactttgttagtatcttttttctctaataaggtaaggttagatattcccttagacgggaactacacaattttaatcggtttccctatcatttatagacagttattgcctgaaacaactataatccatttgaagacacctcaatttttggccaaaaactttaggttcaaattattgcccatttttgtaatgtttacaatgacggtaacccaaataatatggtttcatcattttgctcaattgttctccatttgggttaccttttttgccagttggagttacttgaggtttttccagaaacttgcacccttgaattgtccctctttgccaacaactaattctcaaggtggtcaggaaatattggtcggcgatgcatctgatacttttcaattgatttacttctttcctgatttgattaagccgattttgaggccgattttcaatttcatttataatgtagttgttgtaaaatttaaagtcattaaaccttttcatgatattgatatagatattgggaacaccatcgcagaaagtagaggcgccaaaaaaattatgactgtagaagaaagaagaagacagttagctttacaagttttggaagagcgtatggtaaacccttga

SEQ ID NO: 9927 - DNA, 1671 bp, Saccharomyces cerevisiae
atggaaagagtatggtttgcaaaattaacaaataaaggaactattaaaatcgggtatatctcatttatacttctaagtttgctatgtcaatctctgattgggctggttaatgctgattttaattatgaaggctgttacagtgccgcggatatccagtctgctggactgtctctgaaaaactcatacatatatcaatcagtgtcatactgtcaaaaccagtgccctgagtcagcagtagtagcattatttaacgggtcagattgttactgcggtaattcggtaagttttctgacttctttgacgaaatcaacagattcaaactgtggaactaaatgctctggctggccttaccaaatgtgtggagggtcatcgtacatgaacgtgtatgtaaatgctgaaacttttgtttcatcggttgaatcttcctcttccaaagaagggtctagcacttcctatatgccctcaacaacttcttcattgtcctccgcccaaatttcttcaactactaggagaacgtcaacagatatgaaaagttctgaaatgatagccacgacagtttctaccacttcaacaacctcttcctcgacttcctctactacctcttctaccacctcttctaccacctcttctaccacctcttctactacctcttcctcgacttcctctactacctcttctaccacctcttctaccacctcttctaccacctcttctaccacctcttctactacctcttctactacctcctctactacctcctctactacctctatcttttctgttacgtctagctcctcatccattacattgtcctcatctgagcataccacagtcgatagccgtacttcttcaccctcttccaccttggtgccagtgtcctcgagtagcagcacactatcaactccaaaagtgacctcaatgacccctagtacgtcatcaacgataccaatagttacctcagtggaactagtgactagtgtggttacaaaagcgatcgtgagtacttctgatcaacatcaggaaacaatatttgttacgaggacatccgtggttgaacgatcttctgaggtagctactgctactgctgccgcctcaaataatagatctaattcgacttcgaagcagcgtctgagtggtggagccattgccggtattgttattggtgttgtgtttggcgtaatttttattattttgattctattgttcctgatatggaggagacggaaatcgcacgaccaattagacttggaggaaacgaaacattatcagccctattcgttcggtgatgaggatgcaaatccaataggaccgcctccctcctctggtacgacaaattggatgagacattcaaggggtaatacagcgggttctatcggtacaagtaatatgtatggtttttctatgagtaatggtgcaaattatagtagtcctagttcaaacaccagtggaagcatcataaacaacttggctggcttacaagatgctacggttcagaaacagaaccttccatcgacagtttttgaagaggcaaatactttgaatagtgcaaatgaaaggttcagtgccaattctttacccgacatgatgatgagcggaccattgcaagtggtaaaccctgataatcctgataatcctgaattatctagtaccgtatctcataatcgagcctga

SEQ ID NO: 9928 - DNA, 1671 bp, Artificial Sequence
  Description of Artificial Sequence: Synthetic polynucleotide
atggaaagagtatggtttgcaaaattaacaaataaaggaactattaaaatcgggtatatctcttttatacttttaagtttgttatgtcaatctttgattgggttggttaatgctgattttaattatgaaggctgttacagtgccgcggatatccagtctgctggattatctttgaaaaactcttacatatatcaatctgtgtcttactgtcaaaaccagtgccctgagtctgcagtagtagcattatttaacgggtctgattgttactgcggtaattctgtaagttttttaacttctttgacgaaatctacagattccaactgtggaactaaatgctctggctggccttaccaaatgtgtggagggtcttcctacatgaacgtgtatgtaaatgctgaaacttttgtttcttctgttgaatcttcctcttccaaagaagggtctagcacttcctatatgccctccacaacttcttctttgtcctccgcccaaatttcttctactactaggagaacgagtacagatatgaaaagttctgaaatgatagccacgacagtttctaccacttctacaacctcttccagcacttcctctactacctcttctaccacctcttctaccacctcttctaccacctcttctactacctcttccagcacttcctctactacctcttctaccacctcttctaccacctcttctaccacctcttctaccacctcttctactacctcttctactacctcctctactacctcctctactacctctatcttttctgttacgtctagctcctcctccattacattgtcctcttctgagcataccacagtcgatagccgtacttcttctccctcttccaccttggtgccagtgtcctccagtagcagcacattatctactccaaaagtgacctccatgacccctagtacgtcttctacgataccaatagttacctctgtggaattagtgactagtgtggttacaaaagcgatcgtgagtacttctgatcaacatcaggaaacaatatttgttacgaggacatccgtggttgaaagatcttctgaggtagctactgctactgctgccgcctctaataatagatctaattctacttctaagcagcgtttgagtggtggagccattgccggtattgttattggtgttgtgtttggcgtaatttttattattttgattttattgttcttgatatggaggagaagaaaatctcacgaccaattagacttggaggaaacgaaacattatcagccctattctttcggtgatgaggatgcaaatccaataggaccgcctccctcctctggtacgacaaattggatgagacattccaggggtaatacagcgggttctatcggtacaagtaatatgtatggtttttctatgagtaatggtgcaaattatagtagtcctagtagtaacaccagtggaagcatcataaacaacttggctggcttacaagatgctacggttcagaaacagaaccttccatctacagtttttgaagaggcaaatactttgaatagtgcaaatgaaaggttcagtgccaattctttacccgacatgatgatgagcggaccattgcaagtggtaaaccctgataatcctgataatcctgaattatctagtaccgtatctcataatagagcctga

SEQ ID NO: 9929 - DNA, 1059 bp, Saccharomyces cerevisiae
atgagtaaggataataggttagcaagtattttgctgcagcctgtagcatcatcctctggaaattgtactgaattccatgactcaaagttgcatactctgcaagaggaacttaatttcttgccactagaaggagttgcgtcgaatgtttgcccgccgatgtttagaggtcataagaactacgtgtttgtgttatattgtttgaatcaagtcgatctcgttacgaatttgcaggattctacaaaacgttactacccactgcaaatatttaaagattgtcaattgagttctttggttcagaaggatttttcacactatttccaactcagcaggcaaaaggaaggggaagatcggaacgatagtgataccaccttggttaatgtcgtcaattctggagtatcccgccatagaagtcaattactaaagatgtgtattatacctagaatttgttcctttgacaaatccaactccaaaacctacaagctaattcaggaatatgttaatcgctttgaaaccgttttaacaaaatttggcccagaaaaagatttcaccaaagtttacgctaactggtcaaaactcattgagtcgtttaatgagcttattttacatgacctgttggtgaaatggcaacaatggtctgaattaactcagccaaatgccacggtccatcagaacattccgaatgttctcagggaactcgtaataaaattaacacaaaggtactttacattccaaccttcatacagttgttcgattgatgaattcacaacaattttacttaataaaaatgctttgagtctcttggacgttttcagaaaacccagaaaatataaactgaattttggtttatggctagattgtcaaaacggtattttaatttttacaaatggtattgtgcagatggcagatgaaattacaagtgagagggtgaaatcctttgtcaggccagcacatctcttggtattggaagaccattcaaatgatgaagcagtcaagaaactaatgtttttcactttttcagcgatattacaatgctttacagatgagattctgaattgttaa

SEQ ID NO: 9930 - DNA, 1059 bp, Artificial Sequence
  Description of Artificial Sequence: Synthetic polynucleotide
atgagtaaggataataggttagcaagtattttgttacagcctgtagcatcttcctctggaaattgtactgaattccatgactccaagttgcatactttacaagaggaacttaatttcttgccattggaaggagttgcgtctaatgtttgcccgccgatgtttagaggtcataagaactacgtgtttgtgttatattgtttgaatcaagtcgatctcgttacgaatttgcaggattctacaaaacgttactacccattgcaaatatttaaagattgtcaattgagttctttggttcagaaggatttttctcactatttccaactcagcaggcaaaaggaaggggaagatagaaacgatagtgataccaccttggttaatgtcgtcaattctggagtatcccgccatagaagtcaattattgaagatgtgtattatacctagaatttgttcctttgacaaatccaactccaaaacctacaagttgattcaggaatatgttaatcgctttgaaaccgttttaacaaaatttggcccagaaaaagatttcaccaaagtttacgctaactggtccaaactcattgagtcttttaatgagcttattttacatgacttgttggtgaaatggcaacaatggtctgaattaactcagccaaatgccacggtccatcagaacattccgaatgttctcagggaactcgtaataaaattaacacaaaggtactttacattccaaccttcttacagttgttctattgatgaattcacaacaattttacttaataaaaatgctttgagtctcttggacgttttcagaaaacccagaaaatataaattgaattttggtttatggcttgattgtcaaaacggtattttaatttttacaaatggtattgtgcagatggcagatgaaattacaagtgagagggtgaaatcctttgtcaggccagcacatctcttggtattggaagaccattctaatgatgaagcagtcaagaaattaatgtttttcactttttctgcgatattacaatgctttacagatgagattttgaattgttga

SEQ ID NO: 9931 - DNA, 1830 bp, Saccharomyces cerevisiae
atgaagaattcgacagctgctagttccagatggacgaagagtcgtctctcccatttctttccctcgtacactaatagcagtggtatgggggccgcctcaactgatcaatcttctacgcagggagaagaactgcaccataggaagcactgtgaagaagacaatgatggtcaaaaaccgaaaaagtctcccgtatccacctctacaatgcaaataaaatctagacaggatgaggacgaggatgacggtcgaattgtcattaaaccagttaacgatgaagatgatacatcagtgattataactttcaatcagtcaatatccccttttattattacattgacattcgttgcgtccatttctgggttcatgtttggttatgatactggttacatatcgagtgcgctaatttctatcaatagagatttagacaacaaagttttaacttatggagaaaaagaattaattacggccgccacatcattgggcgctttgattacaagtgtgggcgctggtactgctgctgatgtgtttggaagaagaccatgtttaatgttctccaatctgatgtttttgatcggagcaattttacaaattaccgcgcacaagttttggcaaatggcggccggtagactgattatgggtttcggtgtcggtattggttctttgatttctcctctttttattagtgaaattgctcctaagatgatcaggggtaggttaaccgttataaattccctatggctgacaggtggtcaattgattgcttacggttgtggtgcgggcctgaaccacgtcaaaaacggttggagaatcttagttggtttgtccttgatacctactgttttgcagttttcttttttctgttttttgccggatacaccaagatactacgtaatgaaaggcgatttaaagagagcaaaaatggttctcaaacgaagttacgtaaacactgaagatgaaataattgatcaaaaagttgaagaattatctagcttaaatcaatcgataccaggaaaaaatccaataacaaaattctggaatatggtcaaggaattgcacactgtgccttcaaatttcagagctttgattattggttgtggtctacaagccattcaacaattcacaggttggaattccttaatgtatttctccggtacaatatttgaaactgttggattcaaaaattcttctgccgtttctattattgtctcaggtactaattttgtgttcacattaatagcatttttctgtattgataaaatcggccgtaggtacattttactgattggactacctggtatgactgtggcgctggttatatgtgctatagcgttccatttcctaggtattaagtttaacggtgctgatgcagtagtggcatctgatggattttcatcttggggcattgtcattatcgtatttattattgtgtatgcagccttttatgccctcggtatcggcactgttccatggcaacaatcggaattatttccacaaaacgtcagaggtgtagggacatcctacgctactgccaccaattgggcaggttctttagtcattgcgtctacgttcttgactatgttacaaaatattacaccaacgggtacattttcattctttgccggtgtagcatgtttatcaaccattttttgttacttttgttatccagaactatcaggattggagttagaggaagttcaaacaattttaaaggacggattcaatatcaaagcctctaaagctctagctaaaaagaggaaacaacaggtggccgaaggtgctgcccatcataaactcaaattcgaacctacacaggaaattgtagaaagttag

SEQ ID NO: 9932 - DNA, 1830 bp, Artificial Sequence
  Description of Artificial Sequence: Synthetic polynucleotide
atgaagaattctacagctgctagttccagatggacgaagagtcgtctctcccatttctttccctcttacactaatagcagtggtatgggggccgcctctactgatcaatcttctacgcagggagaagaattgcaccataggaagcactgtgaagaagacaatgatggtcaaaaaccgaaaaagtctcccgtatccacctctacaatgcaaataaaatctagacaggatgaggacgaggatgacggtagaattgtcattaaaccagttaacgatgaagatgatacatctgtgattataactttcaatcagagtatatccccttttattattacattgacattcgttgcgtccatttctgggttcatgtttggttatgatactggttacatatctagtgcgttaatttctatcaatagagatttagacaacaaagttttaacttatggagaaaaagaattaattacggccgccacatctttgggcgctttgattacaagtgtgggcgctggtactgctgctgatgtgtttggaagaagaccatgtttaatgttctccaatttaatgtttttgatcggagcaattttacaaattaccgcgcacaagttttggcaaatggcggccggtagattgattatgggtttcggtgtcggtattggttctttgatttctcctctttttattagtgaaattgctcctaagatgatcaggggtaggttaaccgttataaattccttatggttgacaggtggtcaattgattgcttacggttgtggtgcgggcttgaaccacgtcaaaaacggttggagaatcttagttggtttgtccttgatacctactgttttgcagttttcttttttctgttttttgccggatacaccaagatactacgtaatgaaaggcgatttaaagagagcaaaaatggttctcaaaagaagttacgtaaacactgaagatgaaataattgatcaaaaagttgaagaattatctagcttaaatcaaagtataccaggaaaaaatccaataacaaaattctggaatatggtcaaggaattgcacactgtgccttccaatttcagagctttgattattggttgtggtttacaagccattcaacaattcacaggttggaattccttaatgtatttctccggtacaatatttgaaactgttggattcaaaaattcttctgccgtttctattattgtctctggtactaattttgtgttcacattaatagcatttttctgtattgataaaatcggccgtaggtacattttattgattggattgcctggtatgactgtggcgttggttatatgtgctatagcgttccatttcttgggtattaagtttaacggtgctgatgcagtagtggcatctgatggattttcttcttggggcattgtcattatcgtatttattattgtgtatgcagccttttatgccctcggtatcggcactgttccatggcaacaaagtgaattatttccacaaaacgtcagaggtgtagggacatcctacgctactgccaccaattgggcaggttctttagtcattgcgtctacgttcttgactatgttacaaaatattacaccaacgggtacattttctttctttgccggtgtagcatgtttatctaccattttttgttacttttgttatccagaattatctggattggagttagaggaagttcaaacaattttaaaggacggattcaatatcaaagcctctaaagctttggctaaaaagaggaaacaacaggtggccgaaggtgctgcccatcataaactcaaattcgaacctacacaggaaattgtagaaagttga

SEQ ID NO: 9933 - DNA, 693 bp, Saccharomyces cerevisiae
atgcgccaggtactacaaaaagataaaagggatgtacagctttccaaagctttatcatatctgcttcgacatacagcggtgaaagaaaagttgactattgactcaaacggttatacaccgctgaaagaactattgtctcataatagattgaaaactcataaatgtacggtggatgatatccatcgcattgttaaggaaaatgacaaacaacgctttcatataaaaacgttaggagcggacgaagaatggatctgtgctactcagggacattcaatcaaatcgattcagccatcagatgaggttctcgtaccaattactgaagcgtcgcagttaccacaggaactaattcatggaacaaatcttcaatctgtcataaagattattgaatccggagcaatatcaccaatgagtagaaatcatgtccatttatcgccggggatgttgcacgcgaagggagttattagtggaatgcgttcttcaagtaacgtctatattttcatcgactgccattctccattattctttcaaactttgaaaatgttcaggtcgctcaataatgtttacttaagcagcagtattcccgttgaattgatccaaaaagttgtagttaaaggaaacttgaaagatgaggagaagttagatactttaagaagaattttacacgaaagaaacataccgctcgaaaagatataa

SEQ ID NO: 9934 - DNA, 693 bp, Artificial Sequence
  Description of Artificial Sequence: Synthetic polynucleotide
atgcgccaggtattacaaaaagataaaagggatgtacagctttccaaagctttatcttatttacttcgtcatacagcggtgaaagaaaagttgactattgactccaacggttatacaccgttaaaagaattattgtctcataatagattgaaaactcataaatgtacggtggatgatatccatcgcattgttaaggaaaatgacaaacaacgctttcatataaaaacgttaggagcggacgaagaatggatctgtgctactcagggacattctatcaaatccattcagccaagtgatgaggttctcgtaccaattactgaagcgtctcagttaccacaggaattgattcatggaacaaatcttcaatctgtcataaagattattgaatccggagcaatatctccaatgagtagaaatcatgtccatttatctccggggatgttgcacgcgaagggagttattagtggaatgcgttcttccagtaacgtctatattttcatcgactgccattctccattattctttcaaactttgaaaatgttcaggtctctcaataatgtttacttaagcagcagtattcccgttgaattgatccaaaaagttgtagttaaaggaaacttgaaagatgaggagaagttagatactttaagaagaattttacacgaaagaaacataccgctcgaaaagatatga

SEQ ID NO: 9935 - DNA, 939 bp, Saccharomyces cerevisiae
atggtttcattgactacaatagagcaaagcccagtcaaatgcgagacaaccactgagaaagagagcaatgatactagggggacagattcgaacgagaatgcagagacaaaagaaacaaagaagggttttccattccatgacttggcaaaattgcagaaacagtacaaaaataaatccagtaggaacgagtcactagtagcactaatatatctcttgggttcgatgctgtcattttgtctcctaatatttttcacggacttttatttgatacctttgttccccaccaccactacaatgacagactacattgtattcaatttttatttattgaacgtttttgtattttgtatggtgcatttcatttatcacttcgtcaaaaatatttctctacaacaacatctcgaacattggcagaagttttcgtatttatcgaatatcaacttattgatatcatcacaaatcacaattctttattatctattctatgattacgtgtttttcttcaaaatttttacccttttaatgaacttcataggattagtggcatacttttttatattgacggacaaactcatttcctcgaaaagattcaataaaacagttttcttcatttcggtatcagtagtgtgttgttccttgccactattaaccgcaataatcacctttgatggtttagaaaacctgaaagagaggataaaagtgaacgcaattacgtgggaacttgtggctttggtagcggcatctataatttacgttaccaggttccctgaatcattgttcagacgaaataaaaaggaagaaggttggaatcattccgagtaccttttccatctcttgatttctggtacggctttttaccattttttcattttgattcaatcttatattttgatgcattcaagtttgaatcagcccgaattaattaatttcaagtcttag

SEQ ID NO: 9936 - DNA, 939 bp, Artificial Sequence
  Description of Artificial Sequence: Synthetic polynucleotide
atggtttctttgactacaatagagcaaagcccagtcaaatgcgagacaaccactgagaaagagagcaatgatactagggggacagattccaacgagaatgcagagacaaaagaaacaaagaagggttttccattccatgacttggcaaaattgcagaaacagtacaaaaataaatccagtaggaacgagtctttagtagcattaatatatctcttgggttctatgctttctttttgtctcttaatatttttcacggacttttatttgatacctttgttccccaccaccactacaatgacagactacattgtattcaatttttatttattgaacgtttttgtattttgtatggtgcatttcatttatcacttcgtcaaaaatatttctttacaacaacatctcgaacattggcagaagttttcttatttatccaatatcaacttattgatatcttctcaaatcacaattctttattatcttttctatgattacgtgtttttcttcaaaatttttacccttttaatgaacttcataggattagtggcatacttttttatattgacggacaaactcatttcctctaaaagattcaataaaacagttttcttcattagtgtatctgtagtgtgttgttccttgccattattaaccgcaataatcacctttgatggtttagaaaacttgaaagagaggataaaagtgaacgcaattacgtgggaacttgtggctttggtagcggcatctataatttacgttaccaggttccctgaatctttgttcagaagaaataaaaaggaagaaggttggaatcattccgagtaccttttccatctcttgatttctggtacggctttttaccattttttcattttgattcaatcttatattttgatgcattctagtttgaatcagcccgaattaattaatttcaagtcttga

SEQ ID NO: 9937 - DNA, 3246 bp, Saccharomyces cerevisiae
atgtattttgataaggataattccatgagccctaggccgttattgccaagtgatgagcagaagctaaacattaatcttctaacgaaaaaggagaaattctcgcatttagacccccattatgacgcaaaagccactccacaaagaagcacttcgaatagaaacgttggcgatttacttttggaaaaaagaaccgctaagcctatgattcaaaaggccttgacgaatacggataatttcattgaaatgtaccataatcagcagagaaaaaatcttgatgatgacactattaaagaagtaatgattaatgatgaaaacggaaaaactgtcgctagtaccaacgacggcagatatgacaacgattacgataataacgatattaatgaccaaaaaactttggataatatagcgggaagtccccacatggaaaaaaatcgaaacaaagtaaagattgaacatgactcttcatctcaaaaaccaatagctaaagagtcatccaaagcccaaaaaaatataatcaaaaagggaatcaaggactttaaatttggtagtgtaataggtgatggcgcgtattctactgtaatgttagcgacgtcgattgataccaaaaagaggtacgccgcaaaagtactaaacaaagaatatttaatacgccagaagaaagtcaaatacgtcagcatagaaaaaaccgcccttcaaaagctcaataattctcctagtgttgtgcgattattttccacttttcaggatgaatcaagcctatactttctcttagagtatgcccccaatggggactttctttctttaatgaaaaaatacggttcattagacgaaacctgcgcacgatattatgctgcgcaaataatagatgccatagactacttacattccaacggtattattcatagagatataaaaccagaaaatattcttttagatggagaaatgaagatcaaactgactgattttggtactgcgaagttactgaatcctacaaataatagcgtttcgaaaccagaatacgatttatcaacaaggtcgaaatctttcgttggaactgcagaatacgtatctccagaacttttaaatgacagttttacagactatcgttgcgatatttgggccttcggatgtatacttttccagatgattgccggaaaaccaccattcaaagctaccaatgaatacttgactttccaaaaggtaatgaaagttcagtacgcctttacaccaggtttcccacttattatcagagatttggttaagaaaatcttagtaaaaaacttagaccgaagattgacgataagccaaattaaggaacatcattttttcaaagatttgaattttaaagacggctctgtttggtcaaaaacgcctccagagatcaaaccatataaaatcaacgccaaatccatgcaggcaatgccaagcggaagcgatagaaaactggtgaagaaatcagtcaacacacttggcaaatcgcatctagtgactcaaaggtcagcttcaagtccctctgttgaggaaactactcattcaaccctatacaataacaatactcacgcttctactgaaagtgaaatatcaataaagaagagacccactgatgaaagaacagcgcagatacttgaaaatgcaagaaagggtataaacaataggaaaaatcaaccaggcaagagaacaccaagtggtgcagcttctgctgccctagcagcttctgctgctttaaccaagaaaaccatgcaaagctatccaacttctagttcgaaaagtagcaggtcaagctctcctgcgacaacatcaagaccaggaacttataagcgtacttcttctacagaaagtaaaccatttgccaaatctccacctttgtcagcatcagttttatcgtcaaaagtcccaatgcctccatacacacctccaatgtcgccccctatgacaccatatgatacatatcaaatgacacctccctatacgacaaaacagcaggattattctgataccgcaattgccgcacctaagccttgtattagtaagcaaaatgttaaaaatagcacagattctcccttgatgaacaagcaagatattcaatggtccttttacctgaaaaacatcaacgaacatgtactaaggacggaaaaactggattttgttaccacaaattacgatatcttagagaagaaaatgcttaaactaaatggttcattgttagatcctcaactgtttggtaagcctagacatacttttttatcccaagtagctaggagtgggggagaggttacaggttttcgaaatgatccaactatgactgcttattccaaaacagaagatacgtactattcgaaaaatattatcgatttgcagctcttggaagatgattatcgaattgaaggaggtgacttatcggagttgcttactaacagaagcggagaagggtacaaatgcaatcaaaacagctcaccaatgaaagacgatgataaatccgaatctaacaataaaggaagctctgttttttctggcaagattaaaaaattatttcaccctacctcagcagctgaaacgctctcttcctctgatgaaaaaaccaagtactataaacgaaccattgtaatgacatcatttggaaggtttctagtatttgccaagaggaggcagccaaatccagttacaaatttaaagtatgaactagaatatgacataaatttgcgtcaacagggtaccaaaataaaagaactaatcattcccttggaaatgggaactaatcatatagttgtgattcagacaccttacaagtcatttcttttgagcactgataaaaaaaccacgagcaaattgtttactgttctcaaaaaaattcttaattcgaatacaaataaaatagagaaagaactgttgcaaagaaaccaaaaggtaattgaaagaagaacatcatcatccggaagagccatacctaaagatcttccaacttccaagtctccttcgccaaaacccaggacgcatagccaatctccatcaatttcaaagcacaattcgttttctgaatcgattaatagcgctaagagcaacagatcaagcagaatttttgaaacctttatcaatgccaaggaacaaaattcaaaaaaacacgctgctccagtaccgttaaccagtaaattagttaacggattgccaaaaagacaagttaccgtgggattaggtctaaacacaggaacaaatttcaaaaactcatctgcaaaatcgaagaggtcgtaa

SEQ ID NO: 9938 - DNA, 3246 bp, Artificial Sequence
  Description of Artificial Sequence: Synthetic polynucleotide
atgtattttgataaggataattccatgagccctaggccgttattgccaagtgatgagcagaagttgaacattaatcttttgacgaaaaaggagaaattctctcatttagacccccattatgacgcaaaagccactccacaaagaagcacttccaatagaaacgttggcgatttacttttggaaaaaagaaccgctaagcctatgattcaaaaggccttgacgaatacggataatttcattgaaatgtaccataatcagcagagaaaaaatcttgatgatgacactattaaagaagtaatgattaatgatgaaaacggaaaaactgtcgctagtaccaacgacggcagatatgacaacgattacgataataacgatattaatgaccaaaaaactttggataatatagcgggaagtccccacatggaaaaaaatagaaacaaagtaaagattgaacatgactcttcttctcaaaaaccaatagctaaagagtcttccaaagcccaaaaaaatataatcaaaaagggaatcaaggactttaaatttggtagtgtaataggtgatggcgcgtattctactgtaatgttagcgacgtccattgataccaaaaagaggtacgccgcaaaagtattgaacaaagaatatttaatacgccagaagaaagtcaaatacgtcagcatagaaaaaaccgcccttcaaaagctcaataattctcctagtgttgtgagattattttccacttttcaggatgaaagtagcttgtactttctcttagagtatgcccccaatggggactttctttctttaatgaaaaaatacggttctttagacgaaacctgcgcaagatattatgctgcgcaaataatagatgccatagactacttacattccaacggtattattcatagagatataaaaccagaaaatattcttttagatggagaaatgaagatcaaattaactgattttggtactgcgaagttattgaatcctacaaataatagcgtttccaaaccagaatacgatttatctacaaggtccaaatctttcgttggaactgcagaatacgtatctccagaacttttaaatgacagttttacagactatcgttgcgatatttgggccttcggatgtatacttttccagatgattgccggaaaaccaccattcaaagctaccaatgaatacttgactttccaaaaggtaatgaaagttcagtacgcctttacaccaggtttcccacttattatcagagatttggttaagaaaatcttagtaaaaaacttagacagaagattgacgataagccaaattaaggaacatcattttttcaaagatttgaattttaaagacggctctgtttggtccaaaacgcctccagagatcaaaccatataaaatcaacgccaaatccatgcaggcaatgccaagcggaagcgatagaaaattagtgaagaaatctgtcaacacacttggcaaatctcatttggtgactcaaaggtctgcttccagtccctctgttgaggaaactactcattctaccttatacaataacaatactcacgcttctactgaaagtgaaatatccataaagaagagacccactgatgaaagaacagcgcagatacttgaaaatgcaagaaagggtataaacaataggaaaaatcaaccaggcaagagaacaccaagtggtgcagcttctgctgccttggcagcttctgctgctttaaccaagaaaaccatgcaaagctatccaacttctagttctaaaagtagcaggagcagctctcctgcgacaacatctagaccaggaacttataagcgtacttcttctacagaaagtaaaccatttgccaaatctccacctttgagtgcatctgttttatcttctaaagtcccaatgcctccatacacacctccaatgtctccccctatgacaccatatgatacatatcaaatgacacctccctatacgacaaaacagcaggattattctgataccgcaattgccgcacctaagccttgtattagtaagcaaaatgttaaaaatagcacagattctcccttgatgaacaagcaagatattcaatggtccttttacttgaaaaacatcaacgaacatgtattgaggacggaaaaattggattttgttaccacaaattacgatatcttagagaagaaaatgcttaaattgaatggttctttgttagatcctcaattatttggtaagcctagacatacttttttatcccaagtagctaggagtgggggagaggttacaggttttagaaatgatccaactatgactgcttattccaaaacagaagatacgtactattctaaaaatattatcgatttgcagctcttggaagatgattatagaattgaaggaggtgacttatctgagttgcttactaacagaagcggagaagggtacaaatgcaatcaaaacagctctccaatgaaagacgatgataaatccgaatctaacaataaaggaagctctgttttttctggcaagattaaaaaattatttcaccctacctctgcagctgaaacgctctcttcctctgatgaaaaaaccaagtactataaaagaaccattgtaatgacatcttttggaaggtttttggtatttgccaagaggaggcagccaaatccagttacaaatttaaagtatgaattggaatatgacataaatttgcgtcaacagggtaccaaaataaaagaattgatcattcccttggaaatgggaactaatcatatagttgtgattcagacaccttacaagagctttcttttgagcactgataaaaaaaccacgagcaaattgtttactgttctcaaaaaaattcttaatagtaatacaaataaaatagagaaagaattattgcaaagaaaccaaaaggtaattgaaagaagaacatcttcttccggaagagccatacctaaagatcttccaacttccaagtctccttctccaaaacccaggacgcatagccaatctccatctatttccaagcacaattctttttctgaaagtattaatagcgctaagagcaacagaagcagcagaatttttgaaacctttatcaatgccaaggaacaaaattctaaaaaacacgctgctccagtaccgttaaccagtaaattagttaacggattgccaaaaagacaagttaccgtgggattaggtttgaacacaggaacaaatttcaaaaactcttctgcaaaatccaagaggtcttga

SEQ ID NO: 9939 - DNA, 3114 bp, Saccharomyces cerevisiae
atggggttcaagaagctcgtatcattccaaccggattatgtcccacaataccatataactaaatatatctcggaacgaactaaactgcaactggtacatataaaccacaaaacctccccattggttcacggttactttgctgttcctacagaatgtcttaatgattcaggtgctccgcataccttggagcatttgatcttcatgggttctaaatcttacccatacaaaggtttattagacacagctggtaatctgtctttgtctaacaccaatgcttggactgataccgaccaaactgtttatacattaagcagtgctggctggaagggattctcaaagttgctacctgcttatctagatcacatcctacatccaactttaacagacgaggcttgtttaactgaggtttatcacatcgacccggaaaatttgggtgataaaggtgtggtatttagtgaaatggaagccattgaaactcagggctggtacatttcagggttagaaaagcagcgattaatgtttcctgaaggaagtggctatcggtcagaaactggtgggctaacgaaaaatttaagaaccttaaccaacgacgaaatcagacaatttcacaaatctctgtattcttctgataatctttgtgtcattgtttgtggtaacgtaccaacagatgaactgttaaccgtcatggaagaatgggataacaaattgccggagattccatcgaatataccaaagaaaagaccatttttggacaacaagctttcgcacataccgcaatctagagataaagttacggaatctactgtagaatttcctgaacttgatgaaagtcagggtgaattactcttttcttggattggtgttccctactcagattttcgtaatgacctagcggttgatgtgctattagattactttactgactctgcattggcagtgtttacaagagaactggttgaaattgacgatcccatggcaaattccactgattgttgcactgattatttcatgagaaccataattgatcttcgtatccaaggtgtcccaacagaaaaaatagcagcaacaaagaccaaggtactggagattttgaaaacccataccattgatttatcaagagttagacaggtagttgaaaatactaaatgggaatatttgctgaactatgaaaaaaatggcgagagtcgtttttctagtgctgtgattaccgactatatttatggtaatgaagatggttcttcattagtgtcttctctcaaggatttaagtgattttgatgctttattacaatggtcccaaaaggactggcaatctttgctgaacagaatattcgtagacaacaaacctatcatagttaccgctaaaccaagcgctttgatgtatgaacaactagagaaagaaaaatcggatttgatcaaacaaagagaagctgaatttgatgatgaaaagaaactggttttattgaaaagattgaacaatgcaaaaaatattaatgataggccaattccgaaatctctactacagaaatttgagattgataatccttcaaagagtgttgaatttgtcaacacgaaaagcattgcaactgtcgattcgtataaatacaataatgttagtgatccgctgaccaaaaaaattttagaaacgaggccagacaattttcctcttttcattcacttaaatcatttcccgtctcaatttatagagctgcattttttggtcaactccgcatctattaaggatacctcgcttttaccatattttaatatgtttgacgagctattttccatgccaatgaaaatccttgatgaggagagtaatgtagaaactatgctctcgtttgaggaagttgtcgccaagttaaaatcagaaactattgacgcacagatcaaccaaggtttgaagggttcttgtcctgaccttattaattttaaaattcaatgtagagctgggggttactctaactctgttcaatggatcaagcactgcctatttgacatggtttttgatgaaaatcgtgttcgtattctgctggagaattatttgaattctattgtagaatggaaaagaaatggtaatgttatgttaagttctttaactaacagaaatctctattcggcaagatcgctgaaaaaatccaccgatccattatttgttgaagcaaaattacaagagatttttgcagaaattgagaatggcaactttgagaaagaaattttgccaagaatagaaacaatgagaaagcaactgagagcaaatttcaacaagtttcatattttggttcttggtgacatctcaaagatcgatgacgtttatgaaccatggaatcccttaattaagtgcttgaacattgcacatccagttgagaagttaaaaattccaccagttccaagagccctagataccatttcatcgatttgcagaacacctggtgaaaaggcctttataataactactcccgcctcagaatctgcttatatgaatctaataacgtctatcccatttaacttggactaccatgatcccgaatacgctattgtctcattggcttccgaatatctagaatgtgttgaaggtccattttggaagggaatccgtggtgccggattggcctatggtgccagcatgttaaaattatgtgagataaattcttggggattcaatatttaccgcggcgctgatattattaaatgttatgaagttggaaaacagattgttcaagattatgcatcaggtgccttggaatttgatgagcagttaatccaaggtgccatcagtagtattattaacaggctggctactatcgaatgcggatactttgaaacagccctgtccaaatatgttgatgaattctgtttgcaaagggggaacaacttcaatgaattgtatttggaaaggttgcagaatgttaccaaaacagatctgaaaaatgccatgcagaaatattttgtcaacatgtttgattccaataaaagcgttgcctttgtgagctgtcatccagctaaattggaatcagttcaagaattctttgaaactcaaggtttcactgtcgaaatagaagagctagaagatgacgatgacgaaattgatagtgaagaagacgaaaatgcgtga

SEQ ID NO: 9940 - DNA, 3114 bp, Artificial Sequence
  Description of Artificial Sequence: Synthetic polynucleotide
atggggttcaagaagctcgtatctttccaaccggattatgtcccacaataccatataactaaatatatcagtgaaagaactaaattacaattggtacatataaaccacaaaacctccccattggttcacggttactttgctgttcctacagaatgtcttaatgattctggtgctccgcataccttggagcatttgatcttcatgggttctaaatcttacccatacaaaggtttattagacacagctggtaatttatctttgtctaacaccaatgcttggactgataccgaccaaactgtttatacattaagcagtgctggctggaagggattctccaagttgttacctgcttatttggatcacatcttgcatccaactttaacagacgaggcttgtttaactgaggtttatcacatcgacccggaaaatttgggtgataaaggtgtggtatttagtgaaatggaagccattgaaactcagggctggtacatttctgggttagaaaagcagagattaatgtttcctgaaggaagtggctatagaagtgaaactggtgggcttacgaaaaatttaagaaccttaaccaacgacgaaatcagacaatttcacaaatctttgtattcttctgataatctttgtgtcattgtttgtggtaacgtaccaacagatgaattattaaccgtcatggaagaatgggataacaaattgccggagattccatccaatataccaaagaaaagaccatttttggacaacaagctttctcacataccgcaatctagagataaagttacggaatctactgtagaatttcctgaacttgatgaaagtcagggtgaattactcttttcttggattggtgttccctactctgattttcgtaatgacttggcggttgatgtgttattagattactttactgactctgcattggcagtgtttacaagagaattggttgaaattgacgatcccatggcaaattccactgattgttgcactgattatttcatgagaaccataattgatcttcgtatccaaggtgtcccaacagaaaaaatagcagcaacaaagaccaaggtattggagattttgaaaacccataccattgatttatctagagttagacaggtagttgaaaatactaaatgggaatatttgttgaactatgaaaaaaatggcgagagtcgtttttctagtgctgtgattaccgactatatttatggtaatgaagatggttcttctttagtgtcttctctcaaggatttaagtgattttgatgctttattacaatggtcccaaaaggactggcaatctttgttgaacagaatattcgtagacaacaaacctatcatagttaccgctaaaccaagcgctttgatgtatgaacaattggagaaagaaaaatctgatttgatcaaacaaagagaagctgaatttgatgatgaaaagaaattggttttattgaaaagattgaacaatgcaaaaaatattaatgataggccaattccgaaatctttattgcagaaatttgagattgataatccttctaagagtgttgaatttgtcaacacgaaaagcattgcaactgtcgattcttataaatacaataatgttagtgatccgttaaccaaaaaaattttagaaacgaggccagacaattttcctcttttcattcacttaaatcatttcccgtctcaatttatagagttacattttttggtcaactccgcatctattaaggatacctctcttttaccatattttaatatgtttgacgagttattttccatgccaatgaaaatccttgatgaggagagtaatgtagaaactatgctcagttttgaggaagttgtcgccaagttaaaaagtgaaactattgacgcacagatcaaccaaggtttgaagggttcttgtcctgaccttattaattttaaaattcaatgtagagctgggggttactctaactctgttcaatggatcaagcactgcttatttgacatggtttttgatgaaaatcgtgttcgtattttattggagaattatttgaattctattgtagaatggaaaagaaatggtaatgttatgttaagttctttaactaacagaaatctctattctgcaagatctttgaaaaaatccaccgatccattatttgttgaagcaaaattacaagagatttttgcagaaattgagaatggcaactttgagaaagaaattttgccaagaatagaaacaatgagaaagcaattgagagcaaatttcaacaagtttcatattttggttcttggtgacatctccaagatcgatgacgtttatgaaccatggaatcccttaattaagtgcttgaacattgcacatccagttgagaagttaaaaattccaccagttccaagagccttggataccatttcttccatttgcagaacacctggtgaaaaggcctttataataactactcccgccagtgaatctgcttatatgaatttgataacgtctatcccatttaacttggactaccatgatcccgaatacgctattgtctctttggcttccgaatatttggaatgtgttgaaggtccattttggaagggaatccgtggtgccggattggcctatggtgccagcatgttaaaattatgtgagataaattcttggggattcaatatttaccgcggcgctgatattattaaatgttatgaagttggaaaacagattgttcaagattatgcatctggtgccttggaatttgatgagcagttaatccaaggtgccatcagtagtattattaacaggttggctactatcgaatgcggatactttgaaacagccctttccaaatatgttgatgaattctgtttgcaaagggggaacaacttcaatgaattgtatttggaaaggttgcagaatgttaccaaaacagatttgaaaaatgccatgcagaaatattttgtcaacatgtttgattccaataaaagcgttgcctttgtgagctgtcatccagctaaattggaatctgttcaagaattctttgaaactcaaggtttcactgtcgaaatagaagagttagaagatgacgatgacgaaattgatagtgaagaagacgaaaatgcgtga

SEQ ID NO: 9941 - DNA, 186 bp, Saccharomyces cerevisiae
atgcagtccatgatctgctcatctgagcacgaaaacctaacctgcaagtactggcctgttagcttcctcgcttcttggtgtgagaatgggtctggcacactgatgcagaaagatggtagtcttttatatgccgtgaaaaatttttcccatatatttgaaaaaaaaatttttcataccaatctatag

SEQ ID NO: 9942 - DNA, 186 bp, Artificial Sequence
  Description of Artificial Sequence: Synthetic polynucleotide
atgcagtccatgatctgctcttctgagcacgaaaacttgacctgcaagtactggcctgttagcttcctcgcttcttggtgtgagaatgggtctggcacattgatgcagaaagatggtagtcttttatatgccgtgaaaaatttttcccatatatttgaaaaaaaaatttttcataccaatttatga

SEQ ID NO: 9943 - DNA, 1299 bp, Saccharomyces cerevisiae
atgagcaacgacgaaactgtagagaaagtcacccaacaagtgtcggaactaaaaagcacagatgttaaagagcaagtagttacaccttgggatgtggaaggtggggttgatgaacaaggtagagcccaaaatattgattacgacaaattgatcaaacaattcggtactaagccggtcaacgaagaaaccctgaagagattcaagcaagtgacgggtcgtgaaccacatcattttttgcgtaagggattgtttttcagtgagcgtgacttcactaaaatattagacctttacgaacaaggcaaaccatttttcctatacactggtagaggtccttcgagcgattctatgcacttgggtcatatgatcccttttgtcttcaccaaatggttacaggaagtgtttgacgtaccattagtcatagagttgacagatgacgaaaaatttttattcaaacacaagttgaccatcaatgacgttaagaattttgcccgtgaaaatgccaaggatatcattgctgttggctttgatccaaagaacacctttatcttttctgatttgcaatacatgggtggtgcattttacgaaactgtagtaagagtttccagacaaattacaggatccactgcaaaggctgttttcgggtttaatgactccgactgtattggtaagttccattttgcctccattcaaattgctaccgcattcccaagctcatttcctaatgtgttaggcttgcctgataagacaccatgtttgattccatgtgcaattgaccaagatccatatttcagagtttgtagggatgtcgcggataaattgaagtactccaaacctgctttgcttcattccagattctttccagctttgcaaggttccacgaccaaaatgtcagcctctgatgataccactgccattttcatgaccgatacaccaaagcaaattcaaaagaaaattaacaagtacgcattcagcggtggtcaagtgtccgccgacctacatagagaattaggtggtaatcccgatgtcgatgttgcataccaatacttgtcatttttcaaggatgacgatgttttcttgaaggaatgctatgacaaatataagtccggtgaattactatcaggtgaaatgaagaaactgtgtatcgagactctgcaagaattcgttaaggcgttccaggaacgcagagctcaggtggacgaagagaccttggacaaattcatggtcccacataagttggtttggggcgaaaaggaaagacttgtcgcacctaagccaaaaactaagcaagaaaagaagtaa

SEQ ID NO: 9944 - DNA, 1299 bp, Artificial Sequence
  Description of Artificial Sequence: Synthetic polynucleotide
atgagcaacgacgaaactgtagagaaagtcacccaacaagtgtctgaattgaaaagcacagatgttaaagagcaagtagttacaccttgggatgtggaaggtggggttgatgaacaaggtagagcccaaaatattgattacgacaaattgatcaaacaattcggtactaagccggtcaacgaagaaaccttgaagagattcaagcaagtgacgggtcgtgaaccacatcattttttgcgtaagggattgtttttcagtgagcgtgacttcactaaaatattagacctttacgaacaaggcaaaccatttttcttgtacactggtagaggtccttccagcgattctatgcacttgggtcatatgatcccttttgtcttcaccaaatggttacaggaagtgtttgacgtaccattagtcatagagttgacagatgacgaaaaatttttattcaaacacaagttgaccatcaatgacgttaagaattttgcccgtgaaaatgccaaggatatcattgctgttggctttgatccaaagaacacctttatcttttctgatttgcaatacatgggtggtgcattttacgaaactgtagtaagagtttccagacaaattacaggatccactgcaaaggctgttttcgggtttaatgactccgactgtattggtaagttccattttgcctccattcaaattgctaccgcattcccaagctcctttcctaatgtgttaggcttgcctgataagacaccatgtttgattccatgtgcaattgaccaagatccatatttcagagtttgtagggatgtcgcggataaattgaagtactccaaacctgctttgcttcattccagattctttccagctttgcaaggttccacgaccaaaatgtctgcctctgatgataccactgccattttcatgaccgatacaccaaagcaaattcaaaagaaaattaacaagtacgcattcagcggtggtcaagtgtccgccgacttgcatagagaattaggtggtaatcccgatgtcgatgttgcataccaatacttgagttttttcaaggatgacgatgttttcttgaaggaatgctatgacaaatataagtccggtgaattattatctggtgaaatgaagaaattatgtatcgagactttacaagaattcgttaaggcgttccaggaacgcagagctcaggtggacgaagagaccttggacaaattcatggtcccacataagttggtttggggcgaaaaggaaagacttgtcgcacctaagccaaaaactaagcaagaaaagaagtga

SEQ ID NO: 9945 - DNA, 939 bp, Saccharomyces cerevisiae
atgttgttaagatctagatttttgaaggttattcatgtgaggaaacaattgagcgcctgttcaagatttgcaattcaaacacaaacgagatgtaagagcacagatgcttctgaagatgaagtgaagcatttccaggagctagcccctacttggtgggatacagacggatcacaaagaattctacacaaaatgaatctaactaggttagattttgtgcagaggactgtgaggaaccaggttaaaattcagaatcctgaaatatttgtccctggatttaattacaaggagtttctaccagaatacgtctgcgacaatattcagcgggaaatgcaggaaagcatagagactaatctagataagaggccagaagtgagcgtcttggatgttggatgcggtggtggcattttgagtgaatcgctcgcgagactaaaatgggtgaagaatgttcaagggatcgatctgactcgcgattgtatcatggtagcaaaagagcatgccaagaaagaccccatgctggagggaaagataaattatgagtgcaaggctctggaggatgttactggacaatttgatattatcacctgtatggaaatgctagagcacgtggatatgcctagtgaaattttaaggcattgttggtcgaggttaaatcccgaaaaaggtatactctttttaagtactataaacagagatctcatctcatggtttactacaatttttatgggtgaaaacgtcttgaagatcgtcccaaagggtactcatcatttgagcaaatacataaactcaaaggaaatccttgcctggttcaatgacaactacagtggccaatttcgcttgttggatctcaaggggaccatgtacctcccatatcaagggtgggttgagcacgattgttccgatgtcggtaattattttatggctattcagagactgaattga

SEQ ID NO: 9946 - DNA, 939 bp, Artificial Sequence
  Description of Artificial Sequence: Synthetic polynucleotide
atgttgttaagatctagatttttgaaggttattcatgtgaggaaacaattgagcgcctgttccagatttgcaattcaaacacaaacgagatgtaagagcacagatgcttctgaagatgaagtgaagcatttccaggagttggcccctacttggtgggatacagacggatctcaaagaattttacacaaaatgaatttaactaggttagattttgtgcagaggactgtgaggaaccaggttaaaattcagaatcctgaaatatttgtccctggatttaattacaaggagtttttaccagaatacgtctgcgacaatattcagagggaaatgcaggaaagcatagagactaatttggataagaggccagaagtgagcgtcttggatgttggatgcggtggtggcattttgagtgaatctctcgcgagattgaaatgggtgaagaatgttcaagggatcgatttgactcgcgattgtatcatggtagcaaaagagcatgccaagaaagaccccatgttagagggaaagataaattatgagtgcaaggctttggaggatgttactggacaatttgatattatcacctgtatggaaatgttagagcacgtggatatgcctagtgaaattttaaggcattgttggagcaggttaaatcccgaaaaaggtatactctttttaagtactataaacagagatctcatcagttggtttactacaatttttatgggtgaaaacgtcttgaagatcgtcccaaagggtactcatcatttgagcaaatacataaactccaaggaaatccttgcctggttcaatgacaactacagtggccaatttcgcttgttggatctcaaggggaccatgtacctcccatatcaagggtgggttgagcacgattgttccgatgtcggtaattattttatggctattcagagattgaattga

SEQ ID NO: 9947 - DNA, 2121 bp, Saccharomyces cerevisiae
atggacaagctaactccatctcaatggaaggtaataaataagtcatatgaaccagcgtctacgataaaagtcattgcgggcccaggctcaggaaaaacgctaacgctactatataaagtactacatttaattactgtggagaatattaagcctgaagaaatacttatattttcgttaacaaacaaagcagttgatagtataatagaaaatttactgtccattttcgaaaactcgcatacaaataaggaaattgtccatcagattgggtgttacacagttcatgggttggctaatagaatcgttgtagagaatgaggggatgataaacattatagaagagattggatggagaggattaatgaagttgttaccgccgtcaaagagaaccccccatcatttcagatcatataaggaactcgagaaagttgttaaggattacaagctaaacaacgcaaaaaataataaccccgtcattgagaaactagttgaactgatggataactgtaaagtgatgaccaatgatgatttgatcattcgcgcaaaaaaatacttagagcttgattcttctgattcagatgcatcgtcttttactcaagatctccgcaataaatacaaggttgttcttatcgatgaatttcaggacctctatccaagtttagcacccttaattaccatgatttgcaaaggcaagcagctcattatgtttggtgatacaaatcaaagcatatacggatttttggggagtaacaacgagattatgtcacaattagacaatcttcacccaaaaaattccacgactgtcctgaaattatttgataattttaggtctacccccgaaataatctctctagcatcaaaaattatcaatcgtccactagcagagaaacagattatcgatgatactgatgaaacaccatcagagctagttcgcaagctaccgagtggtgtttcacctcaaataatgacatttgatgatctagccgcagaatctgaatttattattgataaaattacccaattgatttgttcttctgcaaagttttccgatatagcaattctatcaagaacaaattcacatctaacggctatagccagtattttgaagaaatatggtattccttatcaaaaactaaagagtcaacctgattggatggacgatttacgaattcaattccttttagatattctaaaagtgtgttctttagcctccgacgaaaagcataatcgtgagttcaatacgggtgataaatggcaaagtaacttcagcattttggtcacaatgagcgctctcaaagggattggcgatgcttcaatacaagccttgtataaagcatgcagcctgaaaaatctgtcaatttggaaatacctaactatggttcccaattttgaatggccattgggcctctccataaagaaaaaaatggaaaattacacttcaaatttatatgaaatgatcgaaaatgatcaagttcatcaattagatgatccgatggaacttttagaaaaagttgctagcatcacaaataacttaaacctaaatcctacctacttccaatccttaagtgatgctcaatcatctttagagtttaaaacacatctacaagagatggcacaagtaatgaaggtctcaaaatctaataagcccccgggtatttcatttgttaaatggtttctagagacatattttgatcaaacgatggtctttcaccagtctcagcaggcattacaaactaccggtccggggacagtaaaactatctaccatccattctgcaaagggtttagaatttcccatagtatttctaacaaacgggagcatgtccaatttcccaatggatacaaacgccctttatgtggggataactagggcaagaaacttgttgtacatgtgcaacatgaagcacgagagactggtcagtaaatcatcaccatactcaagaaacataatgtctaataatttattctggacttactacaataaggatttgaaacgatctgtatgtgacgttaaggtgacacatggttataatgtgcagcgatacaatcagttacgtaaaaattttggattttatagagcatattcttcactaagaggttgtaagagcgttttcagacgtatatag

SEQ ID NO: 9948 - DNA, 2121 bp, Artificial Sequence
  Description of Artificial Sequence: Synthetic polynucleotide
atggacaagttgactccatctcaatggaaggtaataaataagagttatgaaccagcgtctacgataaaagtcattgcgggcccaggcagtggaaaaacgttaacgttattatataaagtattacatttaattactgtggagaatattaagcctgaagaaatacttatattttctttaacaaacaaagcagttgatagtataatagaaaatttattatccattttcgaaaactctcatacaaataaggaaattgtccatcagattgggtgttacacagttcatgggttggctaatagaatcgttgtagagaatgaggggatgataaacattatagaagagattggatggagaggattaatgaagttgttaccgccgtccaagagaaccccccatcatttcagatcttataaggaactcgagaaagttgttaaggattacaagttgaacaacgcaaaaaataataaccccgtcattgagaaattggttgaattgatggataactgtaaagtgatgaccaatgatgatttgatcattcgcgcaaaaaaatacttagagcttgattcttctgattctgatgcatcttcttttactcaagatctccgcaataaatacaaggttgttcttatcgatgaatttcaggacctctatccaagtttagcacccttaattaccatgatttgcaaaggcaagcagctcattatgtttggtgatacaaatcaaagcatatacggatttttggggagtaacaacgagattatgtctcaattagacaatcttcacccaaaaaattccacgactgtcttgaaattatttgataattttaggtctacccccgaaataatctctttggcatccaaaattatcaatcgtccattggcagagaaacagattatcgatgatactgatgaaacaccaagtgagttagttcgcaagttaccgagtggtgtttctcctcaaataatgacatttgatgatttggccgcagaatctgaatttattattgataaaattacccaattgatttgttcttctgcaaagttttccgatatagcaattttatctagaacaaattctcatttaacggctatagccagtattttgaagaaatatggtattccttatcaaaaattgaagagtcaacctgattggatggacgatttaagaattcaattccttttagatattttgaaagtgtgttctttagcctccgacgaaaagcataatcgtgagttcaatacgggtgataaatggcaaagtaacttcagcattttggtcacaatgagcgctctcaaagggattggcgatgcttctatacaagccttgtataaagcatgcagcttgaaaaatttatccatttggaaatacttgactatggttcccaattttgaatggccattgggcctctccataaagaaaaaaatggaaaattacacttccaatttatatgaaatgatcgaaaatgatcaagttcatcaattagatgatccgatggaacttttagaaaaagttgctagcatcacaaataacttaaacttgaatcctacctacttccaatccttaagtgatgctcaatcttctttagagtttaaaacacatttacaagagatggcacaagtaatgaaggtctccaaatctaataagcccccgggtatttcctttgttaaatggtttttggagacatattttgatcaaacgatggtctttcaccagtctcagcaggcattacaaactaccggtccggggacagtaaaattatctaccatccattctgcaaagggtttagaatttcccatagtatttttaacaaacgggagcatgtccaatttcccaatggatacaaacgccctttatgtggggataactagggcaagaaacttgttgtacatgtgcaacatgaagcacgagagattggtcagtaaatcttctccatactctagaaacataatgtctaataatttattctggacttactacaataaggatttgaaaagatctgtatgtgacgttaaggtgacacatggttataatgtgcagagatacaatcagttacgtaaaaattttggattttatagagcatattcttctttgagaggttgtaagagcgttttcagacgtatatga

SEQ ID NO: 9949 - DNA, 972 bp, Saccharomyces cerevisiae
atgtccaaaactttatctttgcaacttccatgggttgagaaataccgtccccaagttttatctgatatagtcggtaataaagagaccattgatagacttcagcaaatcgctaaagatggtaacatgccccatatgatcatatcaggtatgccaggtataggtaagaccacttcggtacattgccttgctcacgagctccttggccgctcttatgctgacggtgttttagagttgaacgcttcagatgacagaggtattgatgtcgtcagaaaccaaataaaacattttgcccagaagaaactacatttgcctccagggaaacataaaatcgttattcttgatgaggcggattccatgactgctggtgctcagcaagcgttgagaaggaccatggagctatattcgaactctacaaggtttgcatttgcttgtaatcaatcaaacaagatcattgagccgctgcaaagtagatgtgcgattttgaggtattctaaactatccgatgaagacgttctaaaacgtcttttacaaatcataaagctagaggatgttaagtatacaaatgatgggttagaagcaatcatttttacagcggagggtgacatgagacaggccataaacaatctacaaagtacagtagcaggacacggtttagtgaacgcagacaatgtcttcaaaattgttgattctcctcaccctctaatagtgaagaaaatgttactagcctccaacctagaagattcaattcaaatcttaagaacagatctttggaaaaagggttattcctcgattgatatcgtcacaacatctttccgcgttaccaaaaacttagcacaagtgaaagaatcagtaagattggaaatgataaaagaaatcggtttgacccatatgagaattctggagggtgttggaacgtacttgcaactggctagtatgttagcgaaaattcataaactaaataataaagcctga

SEQ ID NO: 9950 - DNA, 972 bp, Artificial Sequence
  Description of Artificial Sequence: Synthetic polynucleotide
atgtccaaaactttatctttgcaacttccatgggttgagaaataccgtccccaagttttatctgatatagtcggtaataaagagaccattgatagacttcagcaaatcgctaaagatggtaacatgccccatatgatcatatctggtatgccaggtataggtaagaccacttctgtacattgccttgctcacgagctccttggccgctcttatgctgacggtgttttagagttgaacgcttctgatgacagaggtattgatgtcgtcagaaaccaaataaaacattttgcccagaagaaattgcatttgcctccagggaaacataaaatcgttattcttgatgaggcggattccatgactgctggtgctcagcaagcgttgagaaggaccatggagttgtattccaactctacaaggtttgcatttgcttgtaatcaaagtaacaagatcattgagccgttacaaagtagatgtgcgattttgaggtattctaaactttccgatgaagacgttttgaaacgtcttttacaaatcataaagttggaggatgttaagtatacaaatgatgggttagaagcaatcatttttacagcggagggtgacatgagacaggccataaacaatttacaaagtacagtagcaggacacggtttagtgaacgcagacaatgtcttcaaaattgttgattctcctcaccctttgatagtgaagaaaatgttattagcctccaacttggaagattctattcaaatcttaagaacagatctttggaaaaagggttattccagtattgatatcgtcacaacatctttccgcgttaccaaaaacttagcacaagtgaaagaaagtgtaagattggaaatgataaaagaaatcggtttgacccatatgagaattttagagggtgttggaacgtacttgcaattggctagtatgttagcgaaaattcataaattgaataataaagcctga

SEQ ID NO: 9951 - DNA, 882 bp, Saccharomyces cerevisiae
atgtccaatgatgagataaaccagaacgaggaaaaggtgaaaagaacaccacctttaccgcctgtgccagaaggcatgtctaaaaagcaatggaaaaaaatgtgtaaaagacagagatgggaggagaataaagccaaatacaatgcggaacgccgtgtaaagaagaagagacttcgccatgaaagaagtgcgaagattcaagaatacattgacaggggagaagaggtcccgcaggaattgattagagagcctcgtatcaatgtgaatcagactgattctgggatagagatcatacttgactgttcttttgatgagttaatgaacgacaaggaaatagtaagcttgtctaaccaggtcaccagggcatactccgcgaatagaagggcgaaccattttgcagaaataaaggtggccccattcgacaaaagactaaagcaaaggtttgaaactactctgaaaaataccaattatgaaaactggaaccattttaaattcctaccagacgacaaaatcatgtttggagatgagcatataagtaaggacaaaatagtgtatttaacggccgatacagaggaaaagctggagaagctggaacccgggatgcgatacattgttggcggcattgtagacaagaatcgttataaagaattgtgtctgaagaaggcccaaaagatgggcattcctacgcgaagattgcccattgacgagtacatcaatctcgaaggcagaagagtgttgacgacaacgcacgtcgtgcaactcatgctgaaatactttgatgaccataactggaaaaatgcctttgaaagcgttttaccacccagaaagctggatgcggaagcaaaatccgcaagctcttcgccagctccaaaggacacatag

SEQ ID NO: 9952 - DNA, 882 bp, Artificial Sequence
  Description of Artificial Sequence: Synthetic polynucleotide
atgtccaatgatgagataaaccagaacgaggaaaaggtgaaaagaacaccacctttaccgcctgtgccagaaggcatgtctaaaaagcaatggaaaaaaatgtgtaaaagacagagatgggaggagaataaagccaaatacaatgcggaacgccgtgtaaagaagaagagacttcgccatgaaagaagtgcgaagattcaagaatacattgacaggggagaagaggtcccgcaggaattgattagagagcctcgtatcaatgtgaatcagactgattctgggatagagatcatacttgactgttcttttgatgagttaatgaacgacaaggaaatagtaagcttgtctaaccaggtcaccagggcatactccgcgaatagaagggcgaaccattttgcagaaataaaggtggccccattcgacaaaagattaaagcaaaggtttgaaactactttgaaaaataccaattatgaaaactggaaccattttaaattcttaccagacgacaaaatcatgtttggagatgagcatataagtaaggacaaaatagtgtatttaacggccgatacagaggaaaagttggagaagttggaacccgggatgagatacattgttggcggcattgtagacaagaatcgttataaagaattgtgtttgaagaaggcccaaaagatgggcattcctacgagaagattgcccattgacgagtacatcaatctcgaaggcagaagagtgttgacgacaacgcacgtcgtgcaactcatgttgaaatactttgatgaccataactggaaaaatgcctttgaaagcgttttaccacccagaaagttggatgcggaagcaaaatccgcaagctcttctccagctccaaaggacacatga

SEQ ID NO: 9953 - DNA, 927 bp, Saccharomyces cerevisiae
atgcaacttgtgccgctagaattgaatagatccactctaagtgggatatctgggtccatctccatctcctgctggatcattgtgtttgtccctcaaatttacgagaacttttaccggaagtcgtctgatgggctgtctttattgttcgtggtactttggttggccggcgatgtctttaaccttatgggtgccgttatgcaacatcttttgtctaccatgatcattcttgctgcttactatacggtggcagatatcattttactaggtcaatgtctatggtacgataatgaggaaaaaccagcagtagaccctattcatctctcccctgccaatccaataaacgaaaacgttctgcacgatgtgttcaatgaacaacaaccgcttttgaattcccaaggtcagccaaatcgtattgatgaagaaatggctgctccttcatccgacggaaacgctggtgatgataatctccgtgaagtcaattcaagaaatttgataaaagacatatttattgttagtggtgtagtttttgtaggtttcatctcgtggtatgtaacctactgcgtaaactacacgcaacctcctcccgtggaggatccatcactgcctgttcccgaactgcagatcaattggatggctcagatattcggttacttaagtgcccttttgtatctgggttcaagaattcctcagatattactgaattttaagagaaagtcttgtgaaggtatcagtttcctattctttttgttcgcctgtttgggtaataccacatttattttctctgtgattgtcatttctttagactggaagtatctaattatgaatgcttcctggttggttggaagcataggtactttattcatggatttcgtcatattttcccagtttttcatttacaaaagaaataaaaaatttatactgaattaa

SEQ ID NO: 9954 - DNA, 927 bp, Artificial Sequence
  Description of Artificial Sequence: Synthetic polynucleotide
atgcaacttgtgccgttggaattgaatagatccactttaagtgggatatctgggtccatctccatctcctgctggatcattgtgtttgtccctcaaatttacgagaacttttacagaaagtcttctgatgggttatctttattgttcgtggtactttggttggccggcgatgtctttaaccttatgggtgccgttatgcaacatcttttgtctaccatgatcattcttgctgcttactatacggtggcagatatcattttattgggtcaatgtttatggtacgataatgaggaaaaaccagcagtagaccctattcatctctcccctgccaatccaataaacgaaaacgttttgcacgatgtgttcaatgaacaacaaccgcttttgaattcccaaggtcagccaaatcgtattgatgaagaaatggctgctccttcttccgacggaaacgctggtgatgataatctccgtgaagtcaattctagaaatttgataaaagacatatttattgttagtggtgtagtttttgtaggtttcatcagttggtatgtaacctactgcgtaaactacacgcaacctcctcccgtggaggatccatctttgcctgttcccgaattacagatcaattggatggctcagatattcggttacttaagtgcccttttgtatttgggttccagaattcctcagatattattgaattttaagagaaagtcttgtgaaggtatcagtttccttttctttttgttcgcctgtttgggtaataccacatttattttctctgtgattgtcatttctttagactggaagtatttgattatgaatgcttcctggttggttggaagcataggtactttattcatggatttcgtcatattttcccagtttttcatttacaaaagaaataaaaaatttatattgaattga

SEQ ID NO: 9955 - DNA, 1830 bp, Saccharomyces cerevisiae
atggataatattttaaaggcatcaaatatggaagggacttcaacaatgacagttacctcgcgtagttctgaagactctagttgtatctcaaatcatgaacaagataccgatacacataaggacggcgacacaagtggtctggaaaacagtaaaatttcgaagagaaagtggatgaaagagttttttaaactttccaaatctccagcttccaaaagcagccggagtataggttccatgaaaagtaaccagagcctcgtttcaatgaaaagtagtgacgatggcaacagttataaaaatgattactcttctatctgtggtaacagccttccatctgcaggcttgagtcgttcgaatagtgtgaaagaattaaaattagattcaactggaagtcagagatcaaaaaataatgttgccatgttagcacgttcttctacaacatctcagacaacgtgctcttcttcttcatcatcatcttcttataactctataaaaggaaatgaaaatgatattttattgcagaataacaatcactttaggcataacaaagaaattcctcaaagtaaagggagctccaacattaacaccgcatcgattatgagccaatacaatgtcgatacgcaagcaaccgctataatgagcgatatgcaaaagcaatacgactcgcaacagatgacatcaccatttgtaaacgaagacttgcatttcgatccaaatggtgaagtttcacacgtaataaaagcaatttttaaagaaattggttataaatacgatgatttcagtgatattcctgtttttcaattaatgcaagaaatgtatcaactagtgaagaagaattccagcgctagaagaacaaagataacagactatgcctctaaacttaaagaaaaagaagcgcaattaaaaagtcaaaatgacaaaattttgaagttagaaacaacaaacaaggcctacaaaactaaatacaaggaggtctctctggaaaataagaaaataaaagaggctttcaaagaactagacaatgagtcatacaatcacgatgaggaattactaaaaaaatacaaatatactagggaaaccttagatagggtcaatagagaacagcaattaatcattgatcaaaacgagtttttgaagaaaagtgtcaatgaactacaaaatgaggttaatgctaccaacttcaagttctctttatttaaagaaaaatatgcaaaattagctgatagcatcactgaattgaatacctctacgaaaaaaagagaggccctgggagaaaacttaacttttgaatgcaatgaattaaaagaaatatgtttgaaatacaaaaaaaacatcgaaaatatatcaaataccaataagaatttacaaaattcgttcaaaaatgaaaggaaaaaagttttagatttgagaaatgagagaaatttgttgaaaaaggaaatactgttgattgaatgtcatggttcatattctctactccttgtatctaatattctgacatgttatcggttcttactgccaagtgatactattattgaaactgaaagcttaattaaggagctactcaacatgaataattcactttcgaaccatgtgtcttcttctgacgagcctccagcggagtactcgaaaagattagaattaaaatgtgtagagtttgaggaaaagttactttatttctatcaagaacttgtgacgaagaaaattatagacgtcatttacaagtgctttattaattattacaagaaaagtaggcaaactgaccaaaaatccaatcagaactccagcactccgtataaacaaagccaaagacaagttccgcactccatcaagtga

SEQ ID NO: 9956 - DNA, 1830 bp, Artificial Sequence
  Description of Artificial Sequence: Synthetic polynucleotide
atggataatattttaaaggcatctaatatggaagggacttctacaatgacagttacctctcgtagttctgaagactctagttgtatctctaatcatgaacaagataccgatacacataaggacggcgacacaagtggtttggaaaacagtaaaatttccaagagaaagtggatgaaagagttttttaaactttccaaatctccagcttccaaaagcagcagaagtataggttccatgaaaagtaaccagagcctcgtttctatgaaaagtagtgacgatggcaacagttataaaaatgattactcttctatctgtggtaacagccttccatctgcaggcttgagtcgttccaatagtgtgaaagaattaaaattagattctactggaagtcagagaagtaaaaataatgttgccatgttagcacgttcttctacaacatctcagacaacgtgctcttcttcttcttcttcttcttcttataactctataaaaggaaatgaaaatgatattttattgcagaataacaatcactttaggcataacaaagaaattcctcaaagtaaagggagctccaacattaacaccgcatctattatgagccaatacaatgtcgatacgcaagcaaccgctataatgagcgatatgcaaaagcaatacgactctcaacagatgacatctccatttgtaaacgaagacttgcatttcgatccaaatggtgaagtttctcacgtaataaaagcaatttttaaagaaattggttataaatacgatgatttcagtgatattcctgtttttcaattaatgcaagaaatgtatcaattagtgaagaagaattccagcgctagaagaacaaagataacagactatgcctctaaacttaaagaaaaagaagcgcaattaaaaagtcaaaatgacaaaattttgaagttagaaacaacaaacaaggcctacaaaactaaatacaaggaggtctctttggaaaataagaaaataaaagaggctttcaaagaattagacaatgagagttacaatcacgatgaggaattattgaaaaaatacaaatatactagggaaaccttagatagggtcaatagagaacagcaattaatcattgatcaaaacgagtttttgaagaaaagtgtcaatgaattacaaaatgaggttaatgctaccaacttcaagttctctttatttaaagaaaaatatgcaaaattagctgatagcatcactgaattgaatacctctacgaaaaaaagagaggccttaggagaaaacttaacttttgaatgcaatgaattaaaagaaatatgtttgaaatacaaaaaaaacatcgaaaatatatccaataccaataagaatttacaaaattctttcaaaaatgaaaggaaaaaagttttagatttgagaaatgagagaaatttgttgaaaaaggaaatattattgattgaatgtcatggttcttattctttactccttgtatctaatattttaacatgttatagattcttattaccaagtgatactattattgaaactgaaagcttaattaaggagttactcaacatgaataattctctttccaaccatgtgtcttcttctgacgagcctccagcggagtactctaaaagattagaattaaaatgtgtagagtttgaggaaaagttactttatttctatcaagaacttgtgacgaagaaaattatagacgtcatttacaagtgctttattaattattacaagaaaagtaggcaaactgaccaaaaatccaatcagaactccagcactccgtataaacaaagccaaagacaagttccgcactccatcaagtga

SEQ ID NO: 9957 - DNA, 2895 bp, Saccharomyces cerevisiae
atgtcctccactaggccagagctaaaattctctgatgtatcagaggagagaaacttctataagaagtatacagggttgccgaagaaaccattaaaaaccattagattagtggataaaggcgactattacacagttataggttcagatgcgatatttgtggcagattcagtctatcatactcaatctgttttaaagaactgccaattggaccctgtaacggcaaagaacttccatgaaccaactaaatatgttactgtttcgctacaagttcttgccactctgctgaagttatgtttgttggatctgggatataaagttgagatatacgataagggttggaaattaataaaaagcgcatctccagggaacattgagcaagttaatgagctaatgaatatgaatattgattcgagtatcatcattgcaagtttgaaagttcaatggaattcccaagatggaaactgcattattggagttgctttcattgataccactgcatacaaggtgggaatgcttgatattgtcgataatgaagtgtattccaacctagagagtttcttgattcaattgggtgtaaaggaatgtttggtgcaggacttgacatcaaattcaaactccaatgctgaaatgcagaaagtaataaatgtaattgatcgctgtgggtgcgtcgttacattattgaaaaactcagaattttctgaaaaagatgtcgaactggatttaaccaagttactgggcgatgatttggcattatcgttaccacaaaaatactctaaattatctatgggtgcatgcaatgcattgattggatatttacaattgctctcagagcaagatcaagtaggcaagtatgaattagttgaacataaattaaaggagtttatgaagttggatgcctccgctattaaagcccttaatttattcccacaaggaccacaaaatccatttggtagcaacaatttagctgtatctggatttacgagtgctggtaattctggtaaagtaacttctcttttccagttactgaatcattgcaaaacaaatgctggtgttcggcttttaaatgaatggttgaagcaaccactgaccaatattgacgaaattaataaaagacatgatttagtcgactatctaattgaccaaatcgagttaagacagatgttgacttctgaatatttacccatgattccagatattcgtagattgactaagaaattaaataaaagaggaaacttagaggatgtcttgaaaatttaccaattcagtaaaagaataccagaaattgttcaagttttcacttcgttcttggaggacgacagccccactgaaccagtaaacgaactggtccgctccgtttggctagctcctttaagccaccacgttgaacctttgtccaaattcgaagaaatggttgaaacaacggttgatttggatgcttatgaagaaaataacgaatttatgattaaagttgagtttaatgaggaattaggaaagataagaagtaaactggatacgttgcgtgatgaaattcattcaatccatcttgattctgctgaagatctaggattcgatccggacaaaaaactgaagttggagaaccatcatctgcatggttggtgtatgaggttgacacgtaatgacgccaaggagttacgtaaacataagaagtacattgagttgtcgacagtaaaagctggtatattttttagtaccaaacaattaaagtcaatcgccaatgaaaccaatattcttcaaaaggagtacgacaagcaacaatcggctctggttagagaaattataaatattacattaacgtacacaccagtttttgaaaaactatccttagtcttagcgcatttagatgtgattgcctcttttgctcatacttcctcgtatgctcctataccatacattagacccaagttgcatcccatggattcggaaagaagaactcacctaataagctcccgtcatccagtactggaaatgcaagacgatataagctttatatctaatgatgtcacattagagagtggaaagggcgactttttaatcataactggaccaaacatgggaggtaaatctacttacatcagacaggttggtgtgatttctttaatggcccaaattggttgtttcgtaccttgtgaagaagctgaaatagccatagtagatgcaattctttgcagggtcggggcaggagattcccaattgaaaggtgtttccacatttatggttgaaatattggaaactgcttctatactaaagaatgcgagtaagaattctttgattattgtagatgaactagggcgtggtactagtacatatgatggttttggtctagcttgggcaattgctgaacatatcgcaagtaagattggatgtttcgctttgtttgcaactcactttcatgaattgacagaattgtctgaaaaattgcccaatgtcaagaatatgcatgttgttgcacatatcgagaaaaatttaaaagaacaaaaacatgacgatgaggacatcacgttgttatacaaagttgagcctggtatttcagatcagtcttttggtattcatgttgcagaagttgttcaatttccagaaaaaattgttaaaatggctaaacgtaaagccaatgaattggacgatctaaaaactaataatgaagatttgaaaaaagctaagctatcattacaggaagttaacgaaggtaatattcgtttgaaggctttactgaaagagtggattagaaaagtgaaggaggagggtttacatgacccaagcaaaattactgaagaagcttcccagcataaaatacaagagctattgcgtgctatagcaaatgaaccagaaaaggaaaacgataattacctgaaatatataaaagccttgttgttataa

SEQ ID NO: 9958 - DNA, 2895 bp, Artificial Sequence
  Description of Artificial Sequence: Synthetic polynucleotide
atgtcctccactaggccagagttgaaattctctgatgtatctgaggagagaaacttctataagaagtatacagggttgccgaagaaaccattaaaaaccattagattagtggataaaggcgactattacacagttataggttctgatgcgatatttgtggcagattctgtctatcatactcaatctgttttaaagaactgccaattggaccctgtaacggcaaagaacttccatgaaccaactaaatatgttactgtttctttacaagttcttgccactttattgaagttatgtttgttggatttgggatataaagttgagatatacgataagggttggaaattaataaaaagcgcatctccagggaacattgagcaagttaatgagttgatgaatatgaatattgattctagtatcatcattgcaagtttgaaagttcaatggaattcccaagatggaaactgcattattggagttgctttcattgataccactgcatacaaggtgggaatgcttgatattgtcgataatgaagtgtattccaacttggagagtttcttgattcaattgggtgtaaaggaatgtttggtgcaggacttgacaagtaatagcaactccaatgctgaaatgcagaaagtaataaatgtaattgatcgctgtgggtgcgtcgttacattattgaaaaactctgaattttctgaaaaagatgtcgaattagatttaaccaagttattaggcgatgatttggcattatctttaccacaaaaatactctaaattatctatgggtgcatgcaatgcattgattggatatttacaattgctcagtgagcaagatcaagtaggcaagtatgaattagttgaacataaattaaaggagtttatgaagttggatgcctccgctattaaagcccttaatttattcccacaaggaccacaaaatccatttggtagcaacaatttagctgtatctggatttacgagtgctggtaattctggtaaagtaacttctcttttccagttattgaatcattgcaaaacaaatgctggtgttcgtcttttaaatgaatggttgaagcaaccattgaccaatattgacgaaattaataaaagacatgatttagtcgactatttgattgaccaaatcgagttaagacagatgttgacttctgaatatttacccatgattccagatattcgtagattgactaagaaattaaataaaagaggaaacttagaggatgtcttgaaaatttaccaattcagtaaaagaataccagaaattgttcaagttttcacttctttcttggaggacgacagccccactgaaccagtaaacgaattggtccgctccgtttggttggctcctttaagccaccacgttgaacctttgtccaaattcgaagaaatggttgaaacaacggttgatttggatgcttatgaagaaaataacgaatttatgattaaagttgagtttaatgaggaattaggaaagataagaagtaaattggatacgttgcgtgatgaaattcattctatccatcttgattctgctgaagatttgggattcgatccggacaaaaaattgaagttggagaaccatcatttgcatggttggtgtatgaggttgacacgtaatgacgccaaggagttacgtaaacataagaagtacattgagttgagtacagtaaaagctggtatattttttagtaccaaacaattaaagtctatcgccaatgaaaccaatattcttcaaaaggagtacgacaagcaacaatctgctttggttagagaaattataaatattacattaacgtacacaccagtttttgaaaaactttccttagtcttagcgcatttagatgtgattgcctcttttgctcatacttccagctatgctcctataccatacattagacccaagttgcatcccatggattctgaaagaagaactcacttgataagctcccgtcatccagtattggaaatgcaagacgatataagctttatatctaatgatgtcacattagagagtggaaagggcgactttttaatcataactggaccaaacatgggaggtaaatctacttacatcagacaggttggtgtgatttctttaatggcccaaattggttgtttcgtaccttgtgaagaagctgaaatagccatagtagatgcaattctttgcagggtcggggcaggagattcccaattgaaaggtgtttccacatttatggttgaaatattggaaactgcttctatattgaagaatgcgagtaagaattctttgattattgtagatgaattggggcgtggtactagtacatatgatggttttggtttagcttgggcaattgctgaacatatcgcaagtaagattggatgtttcgctttgtttgcaactcactttcatgaattgacagaattgtctgaaaaattgcccaatgtcaagaatatgcatgttgttgcacatatcgagaaaaatttaaaagaacaaaaacatgacgatgaggacatcacgttgttatacaaagttgagcctggtatttctgatcagtcttttggtattcatgttgcagaagttgttcaatttccagaaaaaattgttaaaatggctaaacgtaaagccaatgaattggacgatttgaaaactaataatgaagatttgaaaaaagctaagttatctttacaggaagttaacgaaggtaatattcgtttgaaggctttattgaaagagtggattagaaaagtgaaggaggagggtttacatgacccaagcaaaattactgaagaagcttcccagcataaaatacaagagttattgcgtgctatagcaaatgaaccagaaaaggaaaacgataattacttgaaatatataaaagccttgttgttatga

SEQ ID NO: 9959 - DNA, 3093 bp, Saccharomyces cerevisiae
atggaaaatcaaggtggagattacagcccaaatgggttttcaaactcagcaagcaatatgaatgcggtttttaacaatgaaatcaccggtagaagtgacatttcaaatgtaaaccatcaaactggtaccccacgtctggttcctgaaactcaaatatggtcgatgcctgtgccagatcaactgatgacgatgcctaacagagaaaacacccttatgacaggtagtacaataggtccaaatatccccatgaatgtggcttatcccaatacaatatactcgccaacagagcatcagtcgcaatttcagacacaacagaaccgtgacatcagcacgatgatggaacacactaacagtaatgatatgagcggctctggtaaaaatctcaagaaacgtgtatcaaaggcctgtgaccattgccgaaaaagaaaaatcagatgtgatgaagtggaccagcagaccaaaaaatgttcaaactgtattaagtttcagttgccttgcactttcaaacatcgtgatgagattcttaagaagaaaagaaaattagaaatcaaacatcatgcaacaccaggggaatcacttcaaacctcaaatagtattagcaatcctgtagcgtcttcttcagtaccgaacagtggaaggtttgaacttttaaacggtaattcccccttagaaagcaatatcatcgataaagtctccaatattcaaaataatcttaacaaaaaaatgaattcaaagattgaaaaattggatagaaaaatgtcttacattattgacagtgtggctagacttgagtggttattggacaaggctgttaaaaagcaggaaggcaaatacaaggaaaagaacaatttgcccaaaccagcgagaaaaatatactctacggcacttttaactgctcaaaaactctattggttcaaacaaagtttaggagtgaaagcgtccaatgaggagtttctttctccaatcagcgaaatattaagcatatctttaaaatggtatgcaactcaaatgaaaaaatttatggatttgtcatctccggctttcttctccagcgaaataatattatactcattacctccgaaaaagcaagcaaagagacttcttgagaattttcatgctaccttattatcctctgtaactggtataatatcgttaaaagaatgtctagacttagcagaaaagtactacagcgaaagcggcgaaaaactcacatatcctgaacatttattattaaacgtgtgtctctgctcgggtgcatctgccactcaatcaattataagaggtgattcaaagtttctaaggaaagatagatatgatccaacctcccaagagttaaaaaaaatcgaaaacgttgccttactaaatgccatgtattattatcataagctgtccaccatctgttcaggtacaagaacactacaagctttattactactgaaccgatattttcaacttacctacgatactgaactagcaaattgtattttaggaaccgcgattagattggcggttgacatggaattaaatagaaaatcctcttacaagtcactagactttgaagaagccataaggagaagaagaatgtggtggcattgtttttgtacagataaactatattctttaatgttatccagaccccctattgtgggggaacgcgatatggatatgctaacagatcaaaattattatgaagtgataaaaactaatattctacctgatcttattgataaaaaggaagatctcgataaaattactgatgtcaactctgcattgaatgtagttgtaaatttttgtcagcacatatcccttttcatatcatattatgtttcaaaattggttagtattgagagtaaaatatactctacttgttttgctgtcagaagtactctagatctttcattcgatgccatgcttgataaaatcaaagatctcaatgattctttgaacaattggagagacaacttgcacgtaagtatgaaactaaaaagttataaacagtatttatcggtactttacgctcaaaaatcccaagaaaatccggctttaagttttgagattgcatgctctcgtgttttgaattgtcattttagggcgctatattctaaagtgattttgagcatgatgactacatccttattgattgataacgaacgcctatacaaaggttctcgccatgatattcctcagctattcattcttttttcaagtcaatacttaaacgccagtaaagaaatgttacagctgtttcaaggcatcaattaccaggcgcatatgtataacgaggttatgtatcagttctctactgctatgtttgttctcttcttttacgttgtggataatatgaacgatctaaaaaagaaaggtgaggtaaaagagatcatcgatatcctaaaaaaatcttatgatcgattagtgggagaaaatgatgagcagttactgtttgacaatgtcaaatggaacactttgattgtgttctacagccactttttgaaatacgttttgcaacgttatcatgctttgaacgattctacgtcaatatttgattctaaaccttatgatgaaacgataacgaaagttattatgcattcaagaaagataaaagatgaaacagtcgatcaactaattatgagtctaaaatcatatggttctctccattctttacaaaagggcaacgaagccgatctcgccgatgatggactgaatacgaatgatatttcttcagaagactttgcggaggaagcaccaataaacttatttggagagttatcagtcgaaattttaaaactattaaaatctcactcccccatctcaaattttggagacctatcgccatcttcaaataggaaaggaatatctgatgactcatctttgtacccaattcgttcggacctaacatctcttgtttatcccatccatagttctgataccggagatactctttccagtggtctagagacccctgaaaattctaattttaatagtgacagtggaataaaggaagatttcgaagcttttagagccttattgcctttaggaaaattgatctatgacagagattattctttcgtgaacacttttagggattatgaataa

SEQ ID NO: 9960 - DNA, 3093 bp, Artificial Sequence
  Description of Artificial Sequence: Synthetic polynucleotide
atggaaaatcaaggtggagattacagcccaaatgggttttccaactctgcaagcaatatgaatgcggtttttaacaatgaaatcaccggtagaagtgacatttctaatgtaaaccatcaaactggtaccccacgtttagttcctgaaactcaaatatggtctatgcctgtgccagatcaattgatgacgatgcctaacagagaaaacacccttatgacaggtagtacaataggtccaaatatccccatgaatgtggcttatcccaatacaatatactctccaacagagcatcagtctcaatttcagacacaacagaaccgtgacatcagcacgatgatggaacacactaacagtaatgatatgagcggctctggtaaaaatctcaagaaacgtgtatccaaggcctgtgaccattgcagaaaaagaaaaatcagatgtgatgaagtggaccagcagaccaaaaaatgttctaactgtattaagtttcagttgccttgcactttcaaacatcgtgatgagattcttaagaagaaaagaaaattagaaatcaaacatcatgcaacaccaggggaatctcttcaaacctctaatagtattagcaatcctgtagcgtcttcttctgtaccgaacagtggaaggtttgaacttttaaacggtaattcccccttagaaagcaatatcatcgataaagtctccaatattcaaaataatcttaacaaaaaaatgaattctaagattgaaaaattggatagaaaaatgtcttacattattgacagtgtggctagacttgagtggttattggacaaggctgttaaaaagcaggaaggcaaatacaaggaaaagaacaatttgcccaaaccagcgagaaaaatatactctacggcacttttaactgctcaaaaactctattggttcaaacaaagtttaggagtgaaagcgtccaatgaggagtttctttctccaatcagcgaaatattaagcatatctttaaaatggtatgcaactcaaatgaaaaaatttatggatttgtcttctccggctttcttctccagcgaaataatattatactctttacctccgaaaaagcaagcaaagagacttcttgagaattttcatgctaccttattatcctctgtaactggtataatatctttaaaagaatgtttggacttagcagaaaagtactacagcgaaagcggcgaaaaactcacatatcctgaacatttattattaaacgtgtgtctctgctctggtgcatctgccactcaatctattataagaggtgattctaagtttttaaggaaagatagatatgatccaacctcccaagagttaaaaaaaatcgaaaacgttgccttattgaatgccatgtattattatcataagttatccaccatctgttctggtacaagaacattacaagctttattattattaaacagatattttcaacttacctacgatactgaattggcaaattgtattttaggaaccgcgattagattggcggttgacatggaattaaatagaaaatcctcttacaagtctttggactttgaagaagccataaggagaagaagaatgtggtggcattgtttttgtacagataaactttattctttaatgttatccagaccccctattgtgggggaacgcgatatggatatgttaacagatcaaaattattatgaagtgataaaaactaatattttacctgatcttattgataaaaaggaagatctcgataaaattactgatgtcaactctgcattgaatgtagttgtaaatttttgtcagcacatatcccttttcatatcttattatgtttccaaattggttagtattgagagtaaaatatactctacttgttttgctgtcagaagtactttagatctttctttcgatgccatgcttgataaaatcaaagatctcaatgattctttgaacaattggagagacaacttgcacgtaagtatgaaattgaaaagttataaacagtatttaagtgtactttacgctcaaaaatcccaagaaaatccggctttaagttttgagattgcatgctctcgtgttttgaattgtcattttagggcgttatattctaaagtgattttgagcatgatgactacatccttattgattgataacgaacgcctttacaaaggttctcgccatgatattcctcagttattcattcttttttctagtcaatacttaaacgccagtaaagaaatgttacagttatttcaaggcatcaattaccaggcgcatatgtataacgaggttatgtatcagttctctactgctatgtttgttctcttcttttacgttgtggataatatgaacgatttgaaaaagaaaggtgaggtaaaagagatcatcgatatcttgaaaaaatcttatgatagattagtgggagaaaatgatgagcagttactttttgacaatgtcaaatggaacactttgattgtgttctacagccactttttgaaatacgttttgcaacgttatcatgctttgaacgattctacgtctatatttgattctaaaccttatgatgaaacgataacgaaagttattatgcattccagaaagataaaagatgaaacagtcgatcaattgattatgagtttgaaaagttatggttctctccattctttacaaaagggcaacgaagccgatctcgccgatgatggattgaatacgaatgatatttcttctgaagactttgcggaggaagcaccaataaacttatttggagagttaagtgtcgaaattttaaaattattaaaatctcactcccccatctctaattttggagacctttctccatcttccaataggaaaggaatatctgatgactcttctttgtacccaattcgttccgacttgacatctcttgtttatcccatccatagttctgataccggagatactctttccagtggtttagagacccctgaaaattctaattttaatagtgacagtggaataaaggaagatttcgaagcttttagagccttattgcctttaggaaaattgatctatgacagagattattctttcgtgaacacttttagggattatgaatga

SEQ ID NO: 9961 - DNA, 834 bp, Saccharomyces cerevisiae
atgaaattgcacggctttttattttccgtattatcaacatgcgtcgtcattttaccagcgttggcctacagtgaagctgtcacgatggtcaagtcgattgagcagtacttcgatatctgcaataggaatgattcttacacaatgataaaatactacacttcttggtgccaacattgtaaaactctggccccagtatacgaagagcttggtgagctatacgccaaaaaagctaataaagatgataccccaattaacttccttgaagttaactgtgaattcttcgggccaactttatgtaccgacttgcctggatttccaataattgaactggtcaaacctcgtactaagcccttagttcttccgaagctcgattggtcgtctatgaaatttcatgaaagactatggcaaagaatcaagacgtggttcaacaatcctaagtaccaactggatacgtctagggttgttcgttttgaagggagtaggaacctaaagagtttaagcaactttatcgatactgtaagaagtaaagatacagaagaaagattcatagaacatattttcgatgattctaggaattgcaatgaagaattacgttctcaacagcttctgtgtaaagctggtaaagaatactactctgatactttatctaaattatacggtgacgtgaatgggctggaaaaggaaaggcgaagactagaagctttaattaagcaaaatggagatgacttgagtaaagaagttaaagaaaaactgaaaatcattcgtctacaattgagcctattatcacacatagaagaccagttagaagataccagtagtcatgacgagctttga

SEQ ID NO: 9962 - DNA, 834 bp, Artificial Sequence
  Description of Artificial Sequence: Synthetic polynucleotide
atgaaattgcacggctttttattttccgtattatctacatgcgtcgtcattttaccagcgttggcctacagtgaagctgtcacgatggtcaagtctattgagcagtacttcgatatctgcaataggaatgattcttacacaatgataaaatactacacttcttggtgccaacattgtaaaactttggccccagtatacgaagagcttggtgagttatacgccaaaaaagctaataaagatgataccccaattaacttccttgaagttaactgtgaattcttcgggccaactttatgtaccgacttgcctggatttccaataattgaattggtcaaacctcgtactaagcccttagttcttccgaagctcgattggtcttctatgaaatttcatgaaagattatggcaaagaatcaagacgtggttcaacaatcctaagtaccaattggatacgtctagggttgttcgttttgaagggagtaggaacttgaagagtttaagcaactttatcgatactgtaagaagtaaagatacagaagaaagattcatagaacatattttcgatgattctaggaattgcaatgaagaattacgttctcaacagcttttatgtaaagctggtaaagaatactactctgatactttatctaaattatacggtgacgtgaatgggttggaaaaggaaaggagaagattagaagctttaattaagcaaaatggagatgacttgagtaaagaagttaaagaaaaattgaaaatcattcgtttacaattgagcttattatcccacatagaagaccagttagaagataccagtagtcatgacgagctttga

SEQ ID NO: 9963 - DNA, 3351 bp, Saccharomyces cerevisiae
atgaatcagttgacagtgagttatggcctaatttccccagattactgcacttcccaagatgcgcacatcttaccgataacaaagattctgtacccggatatacctggtaaaaactattttcttacttcaggaagggatggttccataattttgcacaagaacacacagctctcgaacgagcctgagactgctgcaactaccataaaaaacgatgcgataagaatgcaagttcatagcgattgggcaagcgatctaatacatgttaatatgaaaaattcagacccatctgcaggggacacattcatatcagtaagtcacgatttttcgatagtattaattagtgtgaatgcgcagttaactacctgggataagaaaataatcggtgaccacgacgattatatcaagtgcatagtgcccatacattatgaaatgtcaaatgactatgaattggaagaacaagagggtggtcctgataatgtacacgatggaataaataatggcattgttgttgatgaacagaacaactttctttttgtgacaggtggtctagatagaaaaatcaaactttggtgcctgagcagcgggccagaaaaaatggctacgctactacacacatttgataatgcacaatcaaacgacacaggctcaatatactccatgagtcccatcatcccaaaatacagttttgatgacaatcaaacgtctcgtccctttgattttgttgccggagactgtaatggtgatttgattttttattcgtgtaaatatcgtaaggaggtgataagaattcaaaacgcccacagaacaaatataaaagtagtaagaactcttgatgactccacacgactaatcagtaccagctcagatggtgtaataaatgtatgggacttgaattgtaggcatgatcagactactggtgcccttcagcttcccaaaaaaattggatcttggtcctgggattcttccatatggtgtgtccaaggaacgagccttgataagttgtattttggtgactctcagggcaatgttatgagagcaaacttatccagttatgaagatgctaaacttacaagaattttcaagcctgatcatcaccaccatcatcatcatcaccatgaacacgaagagcaaaatatatcaactacagatgcgaaagtaaaaaaatatggtggtatccttgatattgcccttttacctaatgaaaaattgttgttttctttttgtactgactcaaatctaaacgtgctcgatttaactaataaccatttcagtgtcaacgaaggtgggttcgcactgaccagaagctcactgctaaccaacaggaggcatgtaataacggaaaacactaaaggccaaatgcagagatgggatatcgtttcatgtgagcttttgaatacttttgattcatcagaaggttcatttgatgatattgtaatgaaatacacctcaaaggaaattctatctcattggtgtactgtttccgttaaggtcggtatgctgttcgtaaaaataaacccaaaatttctgaaaactgaagtttatggatccgcgctaaaggattatcaggttgtgaacaatattgaaattaactcagatgagagatataatttgggtaaaattgttattaattcgcttttcaatgagttcatatcatatgaagtccaaaaggataaacttttaaggaagaaaatttttagtttgaagaaaaaagacttaaccaattcattaaccttggatacgggatataacagtgaatcaaaaaagaataataaagataaaaagagaaaatcaaccttcaaaattagttcaactctgtccattggaaataccaacagcagtggaactccaccaaattcggcacctgcaaccccggtaatggcagagactatagtattagaagaacaaccattgttgcagtcagcttctgataaagcaatagatgactctttagaactcgtgcaaccattgcctgcatccaaaaagccatattttagaacgcagagctctggctccttgttaagtagaaagttcaaatcatttaggtctacttctggtcgtgccacaacagggttaaacactccagaggagcccaaaggaattctgccagatactccgcacgttattaatgatgactcggccttccctcaagctatcaatacaactcagcagtctaaggatgcaactccagaatctatgttatggaatcatcctttcaagctagagcaaaaactatccgctatttcatcacaagatttaccgagtaacaacactcataacaaactaagatcatctgaaaactcaagggcgaattccacgtcaaccttggaaggcaacgaaaagaagaagcctgagttcatgcccgatttactggagcaaattcaagagtcttacaagcaacaatatatgaatacttcttctctaaaatacctgacgaagaggcttccagtcaccaagataatcaaggctagttcatgtccaattattagagtaaaatctgccacgttagttttggtccatctttggaaggaaggctcatgtggtggcagggtattattttccaccctattaccgccatctcatgtcgataatgaaaccgtcagcggcggcaaagaaaattccaaaccgccagatgatgaagaagtagaccttcaagctgtagatgatgacaaattaggaaaatatgatcttattgatggcgagttaggaagcagactcaacagaaggcaaatttttgagcaattggaggaaaatttgccctactggtttgcaaaagctttatttagagatattaagacggtggaagagcaaccaaagttgaacttcttaatcatgccatggtcttctgttggtgggagtgaggcagctggcaatgaaaacaagaagaagtttattagtgcatcagataccacagaatcttctggcaacgatagtagcgatagcagccttggaaatggtaatgaagccgtttccccatcaacacagcaacagttccataatatgctaaagtttggccgtccgaagaccagcgagcaggagttaaaccccacagatttaccgagaatctctgaggcgaatgtcaagctggttgcgcctggaatgattagggtgaaaaaaattaaactttacgtcgctgacagatttgaaacgaaaactcctgaaatgaaagcaaaaatggaacctagtctttggttggatctactatgtaggggccaagtgcttgataacgatatgactttaaataccgttagaacactttactggaaatctcagggtgacatagttctagaatacagaagaaaagtacataattcaccgctagttcatgaggtcaacgggaatgaggggaaatga

SEQ ID NO: 9964 - DNA, 3351 bp, Artificial Sequence
  Description of Artificial Sequence: Synthetic polynucleotide
atgaatcagttgacagtgagttatggcttaatttccccagattactgcacttcccaagatgcgcacatcttaccgataacaaagattttatacccggatatacctggtaaaaactattttcttacttctggaagggatggttccataattttgcacaagaacacacagctctccaacgagcctgagactgctgcaactaccataaaaaacgatgcgataagaatgcaagttcatagcgattgggcaagcgatttgatacatgttaatatgaaaaatagtgacccatctgcaggggacacattcatatctgtaagtcacgatttttccatagtattaattagtgtgaatgcgcagttaactacctgggataagaaaataatcggtgaccacgacgattatatcaagtgcatagtgcccatacattatgaaatgagtaatgactatgaattggaagaacaagagggtggtcctgataatgtacacgatggaataaataatggcattgttgttgatgaacagaacaactttctttttgtgacaggtggtttggatagaaaaatcaaactttggtgcttaagcagcgggccagaaaaaatggctacgttattacacacatttgataatgcacaaagtaacgacacaggctctatatactccatgagtcccatcatcccaaaatacagttttgatgacaatcaaacgtctcgtccctttgattttgttgccggagactgtaatggtgatttgattttttattcttgtaaatatcgtaaggaggtgataagaattcaaaacgcccacagaacaaatataaaagtagtaagaactcttgatgactccacaaggttgatcagtaccagcagtgatggtgtaataaatgtatgggacttgaattgtaggcatgatcagactactggtgcccttcagcttcccaaaaaaattggatcttggtcctgggattcttccatatggtgtgtccaaggaacgagccttgataagttgtattttggtgactctcagggcaatgttatgagagcaaacttatccagttatgaagatgctaaacttacaagaattttcaagcctgatcatcaccaccatcatcatcatcaccatgaacacgaagagcaaaatatatctactacagatgcgaaagtaaaaaaatatggtggtatccttgatattgcccttttacctaatgaaaaattgttgttttctttttgtactgactctaatttgaacgtgctcgatttaactaataaccatttcagtgtcaacgaaggtgggttcgcattgaccagaagcagtttattaaccaacaggaggcatgtaataacggaaaacactaaaggccaaatgcagagatgggatatcgtttcttgtgagcttttgaatacttttgattcttctgaaggttcttttgatgatattgtaatgaaatacacctccaaggaaattttatctcattggtgtactgtttccgttaaggtcggtatgcttttcgtaaaaataaacccaaaatttttgaaaactgaagtttatggatccgcgttaaaggattatcaggttgtgaacaatattgaaattaacagtgatgagagatataatttgggtaaaattgttattaattctcttttcaatgagttcatatcttatgaagtccaaaaggataaacttttaaggaagaaaatttttagtttgaagaaaaaagacttaaccaattctttaaccttggatacgggatataacagtgaaagtaaaaagaataataaagataaaaagagaaaatctaccttcaaaattagttctactttatccattggaaataccaacagcagtggaactccaccaaattctgcacctgcaaccccggtaatggcagagactatagtattagaagaacaaccattgttgcagtctgcttctgataaagcaatagatgactctttagaactcgtgcaaccattgcctgcatccaaaaagccatattttagaacgcagagctctggctccttgttaagtagaaagttcaaaagttttaggtctacttctggtcgtgccacaacagggttaaacactccagaggagcccaaaggaattttaccagatactccgcacgttattaatgatgactctgccttccctcaagctatcaatacaactcagcagtctaaggatgcaactccagaatctatgttatggaatcatcctttcaagttggagcaaaaactttccgctatttcttctcaagatttaccgagtaacaacactcataacaaattgagatcttctgaaaacagcagggcgaattccacgtccaccttggaaggcaacgaaaagaagaagcctgagttcatgcccgatttattggagcaaattcaagagtcttacaagcaacaatatatgaatacttcttctttgaaatacttgacgaagaggcttccagtcaccaagataatcaaggctagtagttgtccaattattagagtaaaatctgccacgttagttttggtccatctttggaaggaaggctcttgtggtggcagggtattattttccaccttattaccgccatctcatgtcgataatgaaaccgtcagcggcggcaaagaaaattccaaaccgccagatgatgaagaagtagaccttcaagctgtagatgatgacaaattaggaaaatatgatcttattgatggcgagttaggaagcagactcaacagaaggcaaatttttgagcaattggaggaaaatttgccctactggtttgcaaaagctttatttagagatattaagacggtggaagagcaaccaaagttgaacttcttaatcatgccatggtcttctgttggtgggagtgaggcagctggcaatgaaaacaagaagaagtttattagtgcatctgataccacagaatcttctggcaacgatagtagcgatagcagccttggaaatggtaatgaagccgtttccccatctacacagcaacagttccataatatgttgaagtttggccgtccgaagaccagcgagcaggagttaaaccccacagatttaccgagaatctctgaggcgaatgtcaagttggttgcgcctggaatgattagggtgaaaaaaattaaactttacgtcgctgacagatttgaaacgaaaactcctgaaatgaaagcaaaaatggaacctagtctttggttggatttattatgtaggggccaagtgcttgataacgatatgactttaaataccgttagaacactttactggaaatctcagggtgacatagttttggaatacagaagaaaagtacataattctccgttggttcatgaggtcaacgggaatgaggggaaatga

SEQ ID NO: 9965 - DNA, 273 bp, Saccharomyces cerevisiae
atgaatgacgatgaagatagagcccaactgaaggctaggctgtggatccgtgtggaagaacgattacaacaggtgttgtcctctgaggacataaaatacacaccgagattcatcaactcattgctggagttagcatatctacaattgggtgaaatggggagcgatttgcaggcatttgctcggcatgccggtagaggtgtggtcaataagagcgacctcatgctatacctgagaaagcaacctgacctacaggaaagagttactcaagaataa

SEQ ID NO: 9966 - DNA, 273 bp, Artificial Sequence
  Description of Artificial Sequence: Synthetic polynucleotide
atgaatgacgatgaagatagagcccaattgaaggctaggctttggatccgtgtggaagaaagattacaacaggtgttgtcctctgaggacataaaatacacaccgagattcatcaactctttgttggagttagcatatttacaattgggtgaaatggggagcgatttgcaggcatttgctagacatgccggtagaggtgtggtcaataagagcgacctcatgctttacttgagaaagcaacctgacttacaggaaagagttactcaagaatga

SEQ ID NO: 9967 - DNA, 1047 bp, Saccharomyces cerevisiae
atgtctatcccagaaactcaaaaaggtgttatcttctacgaatcccacggtaagttggaatacaaagatattccagttccaaagccaaaggccaacgaattgttgatcaacgttaaatactctggtgtctgtcacactgacttgcacgcttggcacggtgactggccattgccagttaagctaccattagtcggtggtcacgaaggtgccggtgtcgttgtcggcatgggtgaaaacgttaagggctggaagatcggtgactacgccggtatcaaatggttgaacggttcttgtatggcctgtgaatactgtgaattgggtaacgaatccaactgtcctcacgctgacttgtctggttacacccacgacggttctttccaacaatacgctaccgctgacgctgttcaagccgctcacattcctcaaggtaccgacttggcccaagtcgcccccatcttgtgtgctggtatcaccgtctacaaggctttgaagtctgctaacttgatggccggtcactgggttgctatctccggtgctgctggtggtctaggttctttggctgttcaatacgccaaggctatgggttacagagtcttgggtattgacggtggtgaaggtaaggaagaattattcagatccatcggtggtgaagtcttcattgacttcactaaggaaaaggacattgtcggtgctgttctaaaggccactgacggtggtgctcacggtgtcatcaacgtttccgtttccgaagccgctattgaagcttctaccagatacgttagagctaacggtaccaccgttttggtcggtatgccagctggtgccaagtgttgttctgatgtcttcaaccaagtcgtcaagtccatctctattgttggttcttacgtcggtaacagagctgacaccagagaagctttggacttcttcgccagaggtttggtcaagtctccaatcaaggttgtcggcttgtctaccttgccagaaatttacgaaaagatggaaaagggtcaaatcgttggtagatacgttgttgacacttctaaataa

SEQ ID NO: 9968 - DNA, 1047 bp, Artificial Sequence
  Description of Artificial Sequence: Synthetic polynucleotide
atgtctatcccagaaactcaaaaaggtgttatcttctacgaatcccacggtaagttggaatacaaagatattccagttccaaagccaaaggccaacgaattgttgatcaacgttaaatactctggtgtctgtcacactgacttgcacgcttggcacggtgactggccattgccagttaagttaccattagtcggtggtcacgaaggtgccggtgtcgttgtcggcatgggtgaaaacgttaagggctggaagatcggtgactacgccggtatcaaatggttgaacggttcttgtatggcctgtgaatactgtgaattgggtaacgaatccaactgtcctcacgctgacttgtctggttacacccacgacggttctttccaacaatacgctaccgctgacgctgttcaagccgctcacattcctcaaggtaccgacttggcccaagtcgcccccatcttgtgtgctggtatcaccgtctacaaggctttgaagtctgctaacttgatggccggtcactgggttgctatctccggtgctgctggtggtttaggttctttggctgttcaatacgccaaggctatgggttacagagtcttgggtattgacggtggtgaaggtaaggaagaattattcagatccatcggtggtgaagtcttcattgacttcactaaggaaaaggacattgtcggtgctgttttgaaggccactgacggtggtgctcacggtgtcatcaacgtttccgtttccgaagccgctattgaagcttctaccagatacgttagagctaacggtaccaccgttttggtcggtatgccagctggtgccaagtgttgttctgatgtcttcaaccaagtcgtcaagtccatctctattgttggttcttacgtcggtaacagagctgacaccagagaagctttggacttcttcgccagaggtttggtcaagtctccaatcaaggttgtcggcttgtctaccttgccagaaatttacgaaaagatggaaaagggtcaaatcgttggtagatacgttgttgacacttctaaatga

SEQ ID NO: 9969 - DNA, 342 bp, Saccharomyces cerevisiae
atgaaggcaaaagacaaatataagggtcgaacgaaaaataaagtgaaaagtgttgatatgatgtatttggctttgcggcgccgaaaaaacgagtttacgcaattgcacaatcatgctgactctgtggcggacccgcgctcttgccggcccggcgataacgctgggcgtgaggctgtgcccggcggagttttttgcgcctgcattttccaaggtttaccctgcgctaaggggcgagattggagaagcaataagaatgccggttggggttgcgatgatgacgaccacgacaactggtgtcattatttaagttgccgaaagaacctgagtgcatttgcaacatga

SEQ ID NO: 9970 - DNA, 342 bp, Artificial Sequence
  Description of Artificial Sequence: Synthetic polynucleotide
atgaaggcaaaagacaaatataagggtagaacgaaaaataaagtgaaaagtgttgatatgatgtatttggctttgagacgccgtaaaaacgagtttacgcaattgcacaatcatgctgactctgtggcggacccgcgctcttgccgccccggcgataacgctgggcgtgaggctgtgcccggcggagttttttgcgcctgcattttccaaggtttaccctgcgctaaggggcgtgattggagaagcaataagaatgccggttggggttgcgatgatgacgaccacgacaactggtgtcattatttaagttgcagaaagaacttgagtgcatttgcaacatga

SEQ ID NO: 9971 - DNA, 2976 bp, Saccharomyces cerevisiae
atggctgacagttcttcgacttcggcgttcatttcaaccctgattatctacggtcttaccgccgtcgtgtttgtctggctctttttgctattgcggcccaagaatagaagagtatacgagccacggtctcttaaggacattcagactattccggaggaagagagaacggaaccagttcctgaaggctacttcgggtgggttgaatatctactctcgaaaccgcactcgtttctcatccagcacacaagcgtggacggctattttctgttaagatatatcggtatcgtgggttcactttcgtttgtgggctgtttgcttcttttaccgatattgcttcccgtgaacgctaccaacggtaacaaccttcaaggctttgaactgctatcattttcaaatgttaccaacaagaacaggttttacgcgcacgttttcctctcgtggatcttttttggcctgttcacctatgtcatctacaaggagctgtattactacgtcgtgtttagacatgctatgcagacaacaccactctatgacggactgctgtcttctaggacggttatcgtcacagaattgcacaagagcatcgctcaagagggggagatgcaaatgcgtttccccaaggcttccaatgtggccttcgcgtatgatctctcagacttgcaagaattgtgtaaagaaagagctaagaacgctgcgaagtacgaagctgcgttgaataaggttctaaacaagtgcgtgaaaatgacccgaaacaagacccaaaagcaacttgacaagttgtacaataacggtaccaagccaaaggacgatttagagacatacgtgccacataaaaagcgccctaaacatcgtttgggaaaattgccgctttgtctaggcggcaaaaaagttaatacgttgtcttattctagtaaaaggattggggaattgaacgaagagattcatgaaaaacaagccgattgggccagtaatgataggcaacctgcctgctttatccagttcgagactcaattggaagcgcaaagatgctaccaatctgtggaagcaatcttgggtaagaaaaattttggtaagcgtcttattggctactcgccagaagacgttaactggggcagcatgcgtctcagttcaaaggagagacactccaggagagctgtggcaaatacaatcatggtgttattgattatcttttgggctttccccgttgctgtggttggtatcatctccaacgtcaatttccttaccgataaagttcccttcttacgtttcatcaacaacatgcccaccttcctgatgggtgtcattactggtttgttgcctactattgcgttggtcgttttgatgtctctagtgccaccttttatcgtaatgttggggaaacttagtggttgcgtcactaggcaagaaacggatctatactcccaagcatggtattacgctttcgctgtgattcaaatctttttagttgtcaccgctacctcttctgcatcttccaccgttgactcgattattgacagaccaagatccgccatgacactattggcaaataacttgccaaaggcatccaacttttatatcatgtacttcatattgaaaggtttaactggccccacatggacgatcttgcaggcagttaacttgctgctaagtaaagtcctaggtagagtgttggattctaccccaaggcaaaaatggaaccgctacaatactttggccacgccgcgcatgggcattgtttacccaggcattgaaattctggtttgcatttatatctgttactcgattatcgcccctatactgctatttttcagtaccgtaatgttgacgctactttatgtggcgtatttgtacaatttaaactacgtgtttggcttctccttcgatttaaaggggcgcaattatccaagagcacttttccagatttttgttggaatttacttgagtgaagtatgtctgcttggactgtttatcatggcaaaaacctggggtcctttggtcctggaagtgttttggatcgtggtcactgccctagctcatatatatatgaagaggaaattcataccgctattcgacgcagttcctttaagcgccatcagacatgcaagaggtgagcccggctattcctatcctacatcggacttgggtctccaggaaatcaaggacattgcagatgaaatgaagggcaaatacgaacaagacaatacacacgggattttgacgcccgtgaccaaggatgatttgaaaaaggccaatctgataccagataacgatggcagctcagagaacggtactcctagtaacccctttgagtctggttctgaacgtgcctctctctctggatcgaacgcagagagtgactcgatcaagaaattaaatgatactgttatcaaaaaatcaagcactctctcctcctctaccaaggacaacaacgaatctacttttgttccagagggtgaaaagtttcgcaagtttcactacagcgatgttgaggcattgagaaataagcgcccttatgatgaggatgatcatagtaaacatggacctgaaggtgccgtgccagtaaacgctgacgcgggagttatttacagtgatccggcagctgtcatgaaagagcctcaggcatttcctccggatgttttggaaaccaatacttggacaagaagaattctacaattcttcaacccaagaaggtcgtatcctttcgacagtgtcaggatgagattcccacttgttttcaacaccagcatcgaatacgatgaagaatatttgagctctgcttataccgatccatgtgtcagagagaaagatcccattgtgtggtgctgtaaggatccgttaggagtttcaaaacagcaaattcaagaggctaggtctaatggcttagatgtaagagatgatttcacaaggtacgatgaaaaaggaaaagtcatattcacttacaaccctcctgattatgaacctgaggctaaaaaatga

SEQ ID NO: 9972 - DNA, 2976 bp, Artificial Sequence
  Description of Artificial Sequence: Synthetic polynucleotide
atggctgacagttcttctactagtgcgttcatttctaccttgattatctacggtcttaccgccgtcgtgtttgtctggctctttttgttgttgagacccaagaatagaagagtatacgagccaagatctcttaaggacattcagactattccggaggaagagagaacggaaccagttcctgaaggctacttcgggtgggttgaatatttgctctctaaaccgcacagttttctcatccagcacacaagcgtggacggctattttttattaagatatatcggtatcgtgggttctctttcttttgtgggctgtttgcttcttttaccgatattgcttcccgtgaacgctaccaacggtaacaaccttcaaggctttgaattattatctttttctaatgttaccaacaagaacaggttttacgcgcacgttttcctctcttggatcttttttggccttttcacctatgtcatctacaaggagttgtattactacgtcgtgtttagacatgctatgcagacaacaccactctatgacggacttttatcttctaggacggttatcgtcacagaattgcacaagagcatcgctcaagagggggagatgcaaatgcgtttccccaaggcttccaatgtggccttcgcgtatgatctctctgacttgcaagaattgtgtaaagaaagagctaagaacgctgcgaagtacgaagctgcgttgaataaggttttgaacaagtgcgtgaaaatgaccagaaacaagacccaaaagcaacttgacaagttgtacaataacggtaccaagccaaaggacgatttagagacatacgtgccacataaaaagcgccctaaacatcgtttgggaaaattgccgctttgtttgggcggcaaaaaagttaatacgttgtcttattctagtaaaaggattggggaattgaacgaagagattcatgaaaaacaagccgattgggccagtaatgataggcaacctgcctgctttatccagttcgagactcaattggaagcgcaaagatgctaccaatctgtggaagcaatcttgggtaagaaaaattttggtaagcgtcttattggctactctccagaagacgttaactggggcagcatgcgtctcagttccaaggagagacactccaggagagctgtggcaaatacaatcatggtgttattgattatcttttgggctttccccgttgctgtggttggtatcatctccaacgtcaatttccttaccgataaagttcccttcttacgtttcatcaacaacatgcccaccttcttaatgggtgtcattactggtttgttgcctactattgcgttggtcgttttgatgtctttggtgccaccttttatcgtaatgttggggaaacttagtggttgcgtcactaggcaagaaacggatttatactcccaagcatggtattacgctttcgctgtgattcaaatctttttagttgtcaccgctacctcttctgcatcttccaccgttgacagtattattgacagaccaagatccgccatgacattattggcaaataacttgccaaaggcatccaacttttatatcatgtacttcatattgaaaggtttaactggccccacatggacgatcttgcaggcagttaacttgttattaagtaaagtcttgggtagagtgttggattctaccccaaggcaaaaatggaaccgctacaatactttggccacgccgcgcatgggcattgtttacccaggcattgaaattttggtttgcatttatatctgttactctattatcgcccctatattactttttttcagtaccgtaatgttgacgttactttatgtggcgtatttgtacaatttaaactacgtgtttggcttctccttcgatttaaaggggcgcaattatccaagagcacttttccagatttttgttggaatttacttgagtgaagtatgtttgcttggattatttatcatggcaaaaacctggggtcctttggtcttggaagtgttttggatcgtggtcactgccttagctcatatatatatgaagaggaaattcataccgcttttcgacgcagttcctttaagcgccatcagacatgcaagaggtgagcccggctattcctatcctacaagtgacttgggtctccaggaaatcaaggacattgcagatgaaatgaagggcaaatacgaacaagacaatacacacgggattttgacgcccgtgaccaaggatgatttgaaaaaggccaatttgataccagataacgatggcagctctgagaacggtactcctagtaacccctttgagtctggttctgaacgtgcctctctctctggaagtaacgcagagagtgactctatcaagaaattaaatgatactgttatcaaaaaaagtagcactctctcctcctctaccaaggacaacaacgaatctacttttgttccagagggtgaaaagtttcgcaagtttcactacagcgatgttgaggcattgagaaataagcgcccttatgatgaggatgatcatagtaaacatggacctgaaggtgccgtgccagtaaacgctgacgcgggagttatttacagtgatccggcagctgtcatgaaagagcctcaggcatttcctccggatgttttggaaaccaatacttggacaagaagaattttacaattcttcaacccaagaaggagttatcctttcgacagtgtcaggatgagattcccacttgttttcaacaccagcatcgaatacgatgaagaatatttgagctctgcttataccgatccatgtgtcagagagaaagatcccattgtgtggtgctgtaaggatccgttaggagtttccaaacagcaaattcaagaggctaggtctaatggcttagatgtaagagatgatttcacaaggtacgatgaaaaaggaaaagtcatattcacttacaaccctcctgattatgaacctgaggctaaaaaatga

SEQ ID NO: 9973 - DNA, 1239 bp, Saccharomyces cerevisiae
atgaaaattgcggtagaaacgacactattcgacttctttgtcatcgatcagtttaaaaaatctactttttcagcgccaaacaccaaagttgacactattaagggttgtattaacaagtttattgaacaatttaatgtatatgatgagcaacacatattttggcaacctcctggaaaatcaaacgtcagattgctgtcaaacgccaatgactttggccaattgggaaactttttgcataagaaaatcaaatgtaacatttttattggagaagaagcattaaggaaatacgatttaaatatctgtggaccttatgacaaatttgtagaaaattctgaccctagtgttaaaaaggttgtgaacagagatgatgtcatgttgtcgcgcaaatgtttaaacatcatatcggaacaactctctatacttgagaagtccataagtaaggctcaaaaccaagtgttgcagtcaagtgaggttgaaggaaaaaaatgtattatcttgccggaagataaaccagaactcatcaagtttttttctaaatttgaaacgagtgttcagttacaggaggtttacgagggctataaggtatatgaaaagctattacaaaaatttggtgggcaaaaaaaaagaatggagtctttcttgaatgaaaacacgccaatgtcaggtgccgaagctatcaagcaaataaatatatctgaggagctcaaggaaaaaggggaacgtttaacaacaccaaacgatccgttattacacgttgaggtgagtaatgaggataactcgctgcactttatattgtacaataaaacgaatatcataattccaggaaattgtacatttgaattttctagccaaatctccgaggtattcagtatcaaaatgggaccgcatgagataggcataaagggtcagaaagagctatggttttttccatcattacctactcctctctccaattacacaatgaaagtcgtaaaccaggatggagaaactattctggttggtaaatgtgctgactccaatgaaataactctaaaatctccactagcctcattttcgacaggcagtttccagacaggcagtttccacactttgcaagatcctactaatgttttccgggcagacgcgctttcttcccctgatgaatcaagcatcatgagcactccctttctaggcgagacagatgaagtttataattctggctctacattaagtaggccatttacttgggaagaaatataa

SEQ ID NO: 9974 - DNA, 1239 bp, Artificial Sequence
  Description of Artificial Sequence: Synthetic polynucleotide
atgaaaattgcggtagaaacgacattgttcgacttctttgtcatcgatcagtttaaaaaatctactttttctgcgccaaacaccaaagttgacactattaagggttgtattaacaagtttattgaacaatttaatgtatatgatgagcaacacatattttggcaacctcctggaaaaagtaacgtcagattgttatctaacgccaatgactttggccaattgggaaactttttgcataagaaaatcaaatgtaacatttttattggagaagaagcattaaggaaatacgatttaaatatctgtggaccttatgacaaatttgtagaaaattctgaccctagtgttaaaaaggttgtgaacagagatgatgtcatgttgtcccgcaaatgtttaaacatcatatctgaacaactctctatacttgagaagtccataagtaaggctcaaaaccaagtgttgcagagcagtgaggttgaaggaaaaaaatgtattatcttgccggaagataaaccagaactcatcaagtttttttctaaatttgaaacgagtgttcagttacaggaggtttacgagggctataaggtatatgaaaagcttttacaaaaatttggtgggcaaaaaaaaagaatggagtctttcttgaatgaaaacacgccaatgagtggtgccgaagctatcaagcaaataaatatatctgaggagctcaaggaaaaaggggaacgtttaacaacaccaaacgatccgttattacacgttgaggtgagtaatgaggataactctttacactttatattgtacaataaaacgaatatcataattccaggaaattgtacatttgaattttctagccaaatctccgaggtattcagtatcaaaatgggaccgcatgagataggcataaagggtcagaaagagttatggttttttccatctttacctactcctctctccaattacacaatgaaagtcgtaaaccaggatggagaaactattttggttggtaaatgtgctgactccaatgaaataactttgaaatctccattggcctctttttctacaggcagtttccagacaggcagtttccacactttgcaagatcctactaatgttttcagagcagacgcgctttcttcccctgatgaaagtagcatcatgagcactccctttttgggcgagacagatgaagtttataattctggctctacattaagtaggccatttacttgggaagaaatatga

SEQ ID NO: 9975 - DNA, 1248 bp, Saccharomyces cerevisiae
atgaacaactcaaagactaaccaacagatgaacacctcaatggggtaccccttaaccgtctacgatgaatgtaacaaattccaactaattgtgccaactttagatgcaaatatcatgctttggtgtattggacaactttcactgctgaatgattctaacggttgtaagcatttgttttggcaaccgaatgacaagtcaaatgtccgaatcttactaaataattatgactatggtcacttgttcaaatacttgcaatgtcaaagaaaatgctcagtttatatcggagaaggaacgcttaagaaatataatttgactatttctacatcctttgacaactttttggacctgacgccctccgaggagaaggaaagcttatgtagagaagacgcacacgaagatcccgtatctccaaaggctggttccgaagaagagataagccctaattccacctctaatgtggttgtgtcaagagaatgcttggataacttcatgaaacaactccttaagttggaagaatcgttaaataagttggaattggagcaaaaggtcacaaataaagaacctaaccacagaataagcggtacgattgacataccagaagataggtccgaactagtgaactttttcacagagttgaaaacagtcaaacaacttgaggacgtttttcaacgttaccatgactatgagaggttatcacaagaatgtgacagtaagacggaaatcgcctctgaccattcgaaaaaggaaactaaaatagaagtggaacccccaaatgagcgctcattgcaaatcacaatgaaccaaagggacaattcattgtatttccagttgtttaacaacacaaactctgttttggcaggcaactgcaaactgaagtttactgacgctggcgataagccaaccacgcaaattattgacatgggtcctcatgaaataggaataaaggagtacaaggaataccgatactttccatacgcacttgatttagaggccggctccactatcgagattgaaaatcagtatggagaagtgatcttcttgggcaagtatggctcttctccaatgattaacttaaggccaccttcaagattatctgcagaaagtttacaggcatcccaagagccattttactcctttcaaatcgatacgttaccagaactggatgactctagtatcatcagtacatccatttcactctcttatgacggtgacgacaatgaaaaagccctgacttgggaagaactctag

SEQ ID NO: 9976 - DNA, 1248 bp, Artificial Sequence
  Description of Artificial Sequence: Synthetic polynucleotide
atgaacaactccaagactaaccaacagatgaacacctccatggggtaccccttaaccgtctacgatgaatgtaacaaattccaattgattgtgccaactttagatgcaaatatcatgctttggtgtattggacaactttctttattgaatgattctaacggttgtaagcatttgttttggcaaccgaatgacaagagcaatgtcagaatcttattgaataattatgactatggtcacttgttcaaatacttgcaatgtcaaagaaaatgctctgtttatatcggagaaggaacgcttaagaaatataatttgactatttctacatcctttgacaactttttggacttaacgccctccgaggagaaggaaagcttatgtagagaagacgcacacgaagatcccgtatctccaaaggctggttccgaagaagagataagccctaattccacctctaatgtggttgtgtccagagaatgcttggataacttcatgaaacaactccttaagttggaagaatctttaaataagttggaattggagcaaaaggtcacaaataaagaacctaaccacagaataagcggtacgattgacataccagaagataggtccgaattagtgaactttttcacagagttgaaaacagtcaaacaacttgaggacgtttttcaacgttaccatgactatgagaggttatctcaagaatgtgacagtaagacggaaatcgcctctgaccattctaaaaaggaaactaaaatagaagtggaacccccaaatgagcgctctttgcaaatcacaatgaaccaaagggacaattctttgtatttccagttgtttaacaacacaaactctgttttggcaggcaactgcaaattgaagtttactgacgctggcgataagccaaccacgcaaattattgacatgggtcctcatgaaataggaataaaggagtacaaggaatacagatactttccatacgcacttgatttagaggccggctccactatcgagattgaaaatcagtatggagaagtgatcttcttgggcaagtatggctcttctccaatgattaacttaaggccaccttccagattatctgcagaaagtttacaggcatcccaagagccattttactcctttcaaatcgatacgttaccagaattagatgactctagtatcatcagtacatccatttctctctcttatgacggtgacgacaatgaaaaagccttaacttgggaagaactctga

SEQ ID NO: 9977 - DNA, 9240 bp, Saccharomyces cerevisiae
atgtcccagcccactaagaataagaagaaagaacacgggaccgattccaagtcatcccgcatgactcggacgttggttaatcatattctttttgaaagaattctcccgatccttccggtggagtctaatctaagtacctattcggaagtggaagagtattcctcattcatttcatgcagatctgtgctcattaacgttaccgtttcccgagatgcaaatgctatggtggaaggcaccttggagttgatagaatcgcttcttcaagggcacgaaatcatttcagataagggtagcagtgacgttattgaatcaatactgattatactaagattgttaagtgatgcgctagagtataattggcaaaatcaagaaagccttcattacaacgacatttcgactcacgtagaacatgaccaagaacagaagtacagaccaaagcttaacagtattctgcccgactactcgtcgactcattccaatggcaacaaacactttttccaccagagcaaacctcaggcactgataccggaactggcatcgaaattgcttgagagttgcgcgaagttgaagttcaatacaagaactttgcaaattttacaaaatatgatcagtcatgttcatggaaacattctaacgactttgagttcctcgattcttccccgccacaaatcctatctgacaaggcacaaccatccttctcattgtaaaatgattgactctactctaggccatattctccgatttgtagcggcttccaatccgtccgagtattttgaatttatcagaaagagtgtgcaagtgcccgtaacacagacacacacgcattcacactcccattcacactctttgccatcttccgtttataacagcatagtgccccactttgatcttttcagcttcatctatttaagcaagcataattttaagaaatacttggaactcatcaaaaacttatcggtgacgttaaggaaaacgatttatcattgcctacttttgcattacagcgccaaagcaataatgttttggataatggctaggcctgcggaatattatgaactcttcaacttattaaaagataataacaatgaacactcgaaatccttaaacacgttaaaccatacacttttcgaggagatccattcgacttttaatgtgaatagcatgataaccaccaatcaaaatgctcatcaaggctcatcttccccttcgtcctcctcgccatcgtcaccacctagctcatcatcatcggataacaacaatcaaaacataatagcaaaatccttaagtcgtcagctttctcaccaccagtcatacattcaacagcagtctgaaagaaaactacattcttcatggactacaaactctcaatcctctacttcactgtcatcttcaacgtctaattcaacaacaactgatttctctactcacactcaaccaggagaatatgacccttccttaccagatactcccacgatgtctaacatcactattagtgcatcttcattattatctcaaactccaactccaacaacacaattgcaacagcggttgaactcagcagctgcagccgccgccgcagctgcttcaccatcgaattccaccccaactggatacacagcagagcaacaaagtcgcgcttcatacgatgcacacaaaactggccatactggtaaggattatgacgaacattttttgtctgtcactcgtttggataatgttttggagttatacacgcactttgatgatactgaggtactaccacacacatccgtactgaagtttttaactactttgacaatgttcgatattgacctttttaatgaattaaacgctacatcattcaaatatattcctgattgtactatgcatcgtccaaaagaaagaacaagttctttcaataatactgcacacgagacaggttccgaaaagacttcgggtataaaacatattacacaaggcttaaagaaattaacttctttaccttcctcaaccaaaaaaactgtaaaatttgtgaagatgttgctaagaaatttaaatgggaatcaagctgtatcagatgttgccctcttagatacaatgagggccttactatcattctttacaatgacttctgcggtctttctcgtggatagaaacttaccctcagtactttttgccaagagactcatccccataatggggacaaatttaagcgtcggtcaagactggaattcaaaaataaataacagtttgatggtttgtttgaaaaaaaactccaccacgtttgttcaattacaattaatattcttctcttcagctattcaattcgatcatgaattattactggcacgtctgagcatcgatacaatggccaacaatttaaacatgcagaagctatgcctttatactgaaggattcaggatattcttcgacataccaagtaagaaggaattgcggaaggcaattgcggttaaaatttctaaatttttcaaaacattattctccattatagcagatattcttttacaagaatttccgtattttgatgagcaaatcaccgacatagttgcttccattcttgacggtacaattatcaatgagtatggtacgaagaaacatttcaaggggagctcaccctctttatgttcgacaacccggtcaagatcaggatctacatctcaaagttcaatgacaccagtttctccgctgggactggatactgatatatgtccaatgaacaccctgtctttagttggttcaagtacttcaagaaattctgacaacgttaattcattaaacagttcaccaaagaacttgtcttctgatccatacttgtcacatcttgtggccccaagagcgcgtcatgctttaggtgggccatctagtattataaggaataaaataccgactacattgacttcacctccaggaacggaaaaatcttcaccagtacaacgtccgcaaacggaaagcatcagtgccacaccaatggccataacaaattctactccattatcgtcggcagcattcggaattcgatcgcctttgcagaaaataagaacgaggcgttattccgatgaaagtttaggaaaattcatgaaatcaacaaataattacattcaagaacatttgataccaaaagatttgaatgaagcaactcttcaagatgctagaagaataatgattaatattttcagtatttttaagagaccgaatagttacttcatcattcctcacaatataaactcgaatttacaatgggtttcgcaggattttagaaatattatgaaaccgattttcgtcgccatcgtaagtccggatgtagatttacagaatactgctcaatcattcatggataccttattatcgaatgttattacttatggtgaatcagatgagaatatcagtattgaagggtatcatcttctttgcagttacactgtaacattatttgcaatgggccttttcgatttgaaaattaataatgaaaagcgtcaaattctcttggatataactgtcaagtttatgaaggttagatcacatttagcagggatcgcggaggcctcacaccacatggaatacataagtgattctgaaaaactcacctttccgctgattatggggactgttggtagggccctatttgtttcattatactctagtcaacaaaaaattgaaaagactttaaagattgcttacacagagtatctttctgcaatcaattttcatgagaggaatattgatgatgctgataaaacttgggttcataatattgagtttgtagaagcgatgtgtcatgacaactacacaacttctggttcaattgctttccaaaggaggacaagaaataatattttacgatttgctactattcctaacgctatcttacttgattctatgaggatgatctataagaagtggcatacttacacacacagtaaaagtttagaaaaacaagaacggaacgacttcagaaatttcgcgggtattttagcctctttgtcgggtatcctattcatcaataaaaagatattgcaagaaatgtatccatacctactcgacaccgtttcagaattgaaaaaaaatatagactcttttatctcaaaacaatgccaatggttaaactatccggatttattaacgagagaaaattcaagagatattctaagtgtagaactgcatcctttgtcttttaacttactttttaataatttgaggctcaagttaaaagaacttgcttgttcagacttatcaataccagaaaatgaaagttcctatgttttattagaacaaataatcaaaatgctgcggacaatcctaggtcgtgatgatgacaattatgtaatgatgcttttttccacagagattgtagatcttattgatttattgacagatgaaataaaaaaaataccagcctattgtccaaaatatctcaaggcaattattcaaatgaccaaaatgttcagtgccttgcagcactcagaggttaatttaggtgtcaaaaatcattttcacgttaaaaataaatggttgaggcaaatcactgattggtttcaagtgagtattgcgagagagtacgatttcgaaaacttgtcaaaacctctaaaagaaatggatttggtaaaaagagacatggatattctatacatagatacggcaatcgaagcttcaaccgctattgcgtacctcacgagacatactttcttagagattccacctgccgcgtcagatcccgaactatctcgatctaggtctgtgatatttgggttttatttcaacatcttaatgaaaggccttgaaaaaagtagtgatcgtgacaattacccagtattcttgaggcacaaaatgagtgtcctcaacgacaatgtaatactttcattaacaaatctttcaaacaccaatgttgatgcgagtttgcagttcaccttaccgatgggctattccggaaatcgaaacattaggaatgcatttttggaggtcttcattaatatcgttacgaactatcggacatacacggctaaaactgaccttggaaaattagaggcagcagacaaatttttgcgatatacgattgaacatccccagctatcgtcctttggagcagcggtttgtcccgctagcgatattgatgcttatgctgctggcttaataaatgcatttgaaacgaggaatgccacccacattgtagtggcacagttgattaaaaatgaaattgaaaaatcttccagacctacggatatccttagaagaaatagctgtgctacgagatcattatctatgctagccaggtccaagggtaacgaatatttgattcgcactttgcaaccattactaaaaaaaattatccagaacagagatttttttgaaattgagaaactaaaaccggaagattcagatgctgaacgtcaaatagagctcttcgttaaatacatgaatgaattattggaatccatatccaactccgtatcttattttccccctcctttattttatatttgccaaaacatttataaagttgcgtgtgaaaaatttccggatcacgcaattatcgccgctgggtctttcgtgtttttacggtttttttgtcctgctttagtcagccctgattctgaaaatatcatagatatttctcacttgagcgaaaagcgtaccttcatcagcttggctaaagttatccaaaatattgccaatggctcagaaaatttctccagatggccagctttgtgttcccaaaaggattttcttaaggaatgtagcgatagaattttcagattcctagctgaactttgtagaacagatcgcacgatagacatccaagtgagaacagacccaacgccaattgcatttgactatcaattccttcattcctttgtttacctttacggtcttgaggtgagaaggaatgtgctaaatgaagcaaaacatgatgatggtgacattgatggtgacgatttctataagaccacatttttacttattgatgatgttcttggccaattaggccaacctaaaatggaattttccaatgaaataccaatatacataagagaacatatggacgactatccggaactgtatgagttcatgaataggcacgcgttcagaaacattgagacttcaacagcgtacagcccaagcgttcacgagtccacctcaagtgaaggcattccaattattacgttaacaatgtcaaatttctcagacagacatgtggacattgatacagttgcttacaagttcttgcaaatttatgctcgaatctggaccaccaaacactgtttaataatcgactgtacagaatttgacgagggagggcttgatatgaggaaatttatttctttggttatgggactattaccagaagttgcacccaaaaattgtataggctgttactactttaacgtaaacgagacatttatggataattatggaaaatgtttggacaaagacaacgtatatgtttcctcgaaaattcctcattatttcattaatagtaactctgatgaaggacttatgaaatctgtgggtataactggacaagggttgaaggttctgcaagatattcgtgtctctctgcatgatatcacgctttatgacgaaaaaagaaatagatttacgccggtatcgttgaaaataggcgatatttactttcaagtcttgcatgaaactcctaggcaatataaaataagggacatgggtactttattcgacgtaaaattcaatgatgtctacgaaattagccgaatatttgaagtacatgtttcgtcaataactggagtggcagctgaatttacagtaacttttcaggacgagagaaggttgatttttagtagtccgaaataccttgaaattgtgaagatgttctattacgcacagatccggttagaaagtgaatatgaaatggataataattcgagtacctcctccccaaattcaaacaacaaggacaaacagcagaaagagagaacaaaactattgtgccacctactgttagtatctcttattggtctgtttgatgagagtaaaaaaatgaaaaacagttcgtataacctaatagctgccactgaggcgtcatttggtttgaactttggctcccattttcatcgctctcccgaggtgtacgtccccgaagatactacaacatttttaggtgttattggaaagtctcttgcagagtctaatccagaactcacagcctatatgtttatctatgttttggaggcattgaagaacaacgtaattcctcacgtttacatccctcataccatttgcggtttgtcttattggatccctaatttataccaacatgtgtatttggctgatgatgaagaaggccccgaaaacatatctcacattttccgaattcttatcaggctctctgtgagagagactgactttaaagccgtatacatgcaatatgtttggttgctacttttagatgatggccgcttaactgacattatcgttgatgaagttattaatcatgcgttagaaagagactccgaaaaccgcgattggaagaaaacaatatcgttactgactgtcctacccactactgaggttgctaataatattattcaaaaaatattggcaaaaattagatcatttttaccgtcattgaagttagaagctatgacccaaagttggtctgaactaacaatattagttaagataagcatccacgttttttttgaaacttctttgctggtacagatgtacttaccagagatcctgtttatcgtatccttattaattgatgttggtccaagggaactcagatcatcactacaccagctattaatgaatgtatgccattccttggctattaactcagctttaccacaagatcatagaaataatctagatgaaataagtgatatatttgcacatcaaaaggtgaagtttatgtttgggttcagcgaggacaaaggacgaattttacagatttttagcgcttcttcttttgcaagcaagtttaatattctggatttcttcatcaataatatattattgctgatggaatattcttcaacgtacgaagcaaacgtgtggaagacaagatacaagaaatatgtcttggaatctgtgtttacaagtaattcttttctttcggcacgttcaatcatgattgttggtataatgggtaaatcttacataactgaagggttatgcaaggctatgttaattgaaaccatgaaagttatcgccgaaccaaagattactgacgagcatcttttcttagccatatctcatatttttacttattccaaaattgttgaaggtttggatcccaaccttgacttaatgaagcacttattttggttttcaacactcttccttgaatcacgtcacccgataatttttgagggtgcccttctctttgtgtcaaactgtataaggcgcctatacatggcccagtttgaaaatgaaagcgaaacatcattgataagtactttacttaaggggagaaagtttgctcatacctttttaagcaagatagagaatcttagtggtattgtttggaatgaagataattttacacacattctgattttcatcattaataaaggactatccaatcctttcattaagagtacggcttttgatttcttgaagatgatgtttagaaactcctactttgagcatcaaatcaatcagaaatctgatcattatttgtgctatatgttcctattgtattttgttttaaactgcaatcaatttgaggaacttttaggtgacgttgattttgaaggagaaatggttaacattgaaaacaagaacaccattcctaaaattttgttagagtggttgagttcggataacgaaaatgcaaacattaccctctatcaaggtgcgatactgttcaaatgttcagttacggatgaaccaagtagatttaggtttgcgttgattattaggcatctattgacaaagaaacccatttgtgcattgcgtttttacagtgttattcgtaacgaaataagaaaaatatcagcatttgagcaaaattcggattgtgttccacttgctttcgatattttaaacttattagtgacgcattcagagtctaattcgttagaaaaacttcacgaagaatccattgaacgtctaaccaaaagaggtttatcgattgtgacttcttctggtatatttgcgaagaactccgacatgatgatacctttagatgtaaaacctgaagatatctatgaacgtaagagaataatgacaatgattttatcaaggatgtcatgttctgcttag

SEQ ID NO: 9978 - DNA, 9240 bp, Artificial Sequence
  Description of Artificial Sequence: Synthetic polynucleotide
atgtcccagcccactaagaataagaagaaagaacacgggaccgattccaagtcttcccgcatgactagaacgttggttaatcatattctttttgaaagaattctcccgatccttccggtggagtctaatttgagtacctattctgaagtggaagagtattccagtttcatttcttgcagatctgtgctcattaacgttaccgtttccagagatgcaaatgctatggtggaaggcaccttggagttgatagaatctcttcttcaagggcacgaaatcatttctgataagggtagcagtgacgttattgaaagtatattgattatattaagattgttaagtgatgcgctcgagtataattggcaaaatcaagaaagccttcattacaacgacatttctactcacgtagaacatgaccaagaacagaagtacagaccaaagcttaacagtattttgcccgactactcttctactcattccaatggcaacaaacactttttccaccagagcaaacctcaggcattaataccggaattggcatccaaattgcttgagagttgcgcgaagttgaagttcaatacaagaactttgcaaattttacaaaatatgatcagtcatgttcatggaaacattttaacgactttgagttccagtattcttccccgccacaaatcctatttgacaaggcacaaccatccttctcattgtaaaatgattgactctactttgggccatattctcaggtttgtagcggcttccaatccgtccgagtattttgaatttatcagaaagagtgtgcaagtgcccgtaacacagacacacacgcattctcactcccattctcactctttgccatcttccgtttataacagcatagtgccccactttgatcttttcagcttcatctatttaagcaagcataattttaagaaatacttggaactcatcaaaaacttatctgtgacgttaaggaaaacgatttatcattgcttgcttttgcattacagcgccaaagcaataatgttttggataatggctaggcctgcggaatattatgaactcttcaacttattaaaagataataacaatgaacactctaaatccttaaacacgttaaaccatacacttttcgaggagatccattctacttttaatgtgaatagcatgataaccaccaatcaaaatgctcatcaaggctcttcttccccttcttcctcctctccatcttctccacctagctcttcttcttctgataacaacaatcaaaacataatagcaaaatccttaagtcgtcagctttctcaccaccagtcttacattcaacagcagtctgaaagaaaattgcattcttcttggactacaaactctcaatcctctacttctttatcttcttctacgtctaattctacaacaactgatttctctactcacactcaaccaggagaatatgacccttccttaccagatactcccacgatgtctaacatcactattagtgcatcttctttattatctcaaactccaactccaacaacacaattgcaacagcgtttgaactctgcagctgcagccgccgccgcagctgcttctccatccaattccaccccaactggatacacagcagagcaacaaagtcgcgcttcttacgatgcacacaaaactggccatactggtaaggattatgacgaacattttttgtctgtcactcgtttggataatgttttggagttatacacgcactttgatgatactgaggtattgccacacacatccgtattgaagtttttaactactttgacaatgttcgatattgacctttttaatgaattaaacgctacatctttcaaatatattcctgattgtactatgcatcgtccaaaagaaagaacaagttctttcaataatactgcacacgagacaggttccgaaaagacttctggtataaaacatattacacaaggcttaaagaaattaacttctttaccttcctccaccaaaaaaactgtaaaatttgtgaagatgttgttaagaaatttaaatgggaatcaagctgtatctgatgttgccctcttagatacaatgagggccttattatctttctttacaatgacttctgcggtctttctcgtggatagaaacttaccctctgtactttttgccaagagactcatccccataatggggacaaatttaagcgtcggtcaagactggaattctaaaataaataacagtttgatggtttgtttgaaaaaaaactccaccacgtttgttcaattacaattaatattcttctcttctgctattcaattcgatcatgaattattattggcacgtttgagcatcgatacaatggccaacaatttaaacatgcagaagttgtgcctttatactgaaggattcaggatattcttcgacataccaagtaagaaggaattgagaaaggcaattgcggttaaaatttctaaatttttcaaaacattattctccattatagcagatattcttttacaagaatttccgtattttgatgagcaaatcaccgacatagttgcttccattcttgacggtacaattatcaatgagtatggtacgaagaaacatttcaaggggagctctccctctttatgttctacaaccagatctagatctggatctacatctcaaagttctatgacaccagtttctccgttgggattagatactgatatatgtccaatgaacaccctttctttagttggtagtagtacttccagaaattctgacaacgttaattctttaaacagttctccaaagaacttgtcttctgatccatacttgtctcatcttgtggccccaagagcgcgtcatgctttaggtgggccatctagtattataaggaataaaataccgactacattgacttctcctccaggaacggaaaaatcttctccagtacaacgtccgcaaacggaaagcatcagtgccacaccaatggccataacaaattctactccattatcttctgcagcattcggaattcgtagtcctttgcagaaaataagaacgaggcgttattccgatgaaagtttaggaaaattcatgaaatctacaaataattacattcaagaacatttgataccaaaagatttgaatgaagcaactcttcaagatgctagaagaataatgattaatattttcagtatttttaagagaccgaatagttacttcatcattcctcacaatataaacagtaatttacaatgggtttctcaggattttagaaatattatgaaaccgattttcgtcgccatcgtaagtccggatgtagatttacagaatactgctcaaagtttcatggataccttattatccaatgttattacttatggtgaaagtgatgagaatatcagtattgaagggtatcatcttctttgcagttacactgtaacattatttgcaatgggccttttcgatttgaaaattaataatgaaaagcgtcaaattctcttggatataactgtcaagtttatgaaggttagaagccatttagcagggatcgcggaggcctctcaccacatggaatacataagtgattctgaaaaactcacctttccgttgattatggggactgttggtagggccttatttgtttctttatactctagtcaacaaaaaattgaaaagactttaaagattgcttacacagagtatctttctgcaatcaattttcatgagaggaatattgatgatgctgataaaacttgggttcataatattgagtttgtagaagcgatgtgtcatgacaactacacaacttctggttccattgctttccaaaggaggacaagaaataatattttaagatttgctactattcctaacgctatcttacttgattctatgaggatgatctataagaagtggcatacttacacacacagtaaaagtttagaaaaacaagaaagaaacgacttcagaaatttcgcgggtattttagcctctttgtctggtatcttattcatcaataaaaagatattgcaagaaatgtatccatacttgctcgacaccgtttctgaattgaaaaaaaatatagactcttttatctccaaacaatgccaatggttaaactatccggatttattaacgagagaaaattctagagatattttaagtgtagaattacatcctttgtcttttaacttactttttaataatttgaggctcaagttaaaagaacttgcttgttctgacttatctataccagaaaatgaaagttcctatgttttattagaacaaataatcaaaatgttgagaacaatcttgggtcgtgatgatgacaattatgtaatgatgcttttttccacagagattgtagatcttattgatttattgacagatgaaataaaaaaaataccagcctattgtccaaaatatctcaaggcaattattcaaatgaccaaaatgttcagtgccttgcagcacagcgaggttaatttaggtgtcaaaaatcattttcacgttaaaaataaatggttgaggcaaatcactgattggtttcaagtgagtattgcgagagagtacgatttcgaaaacttgagtaaacctttgaaagaaatggatttggtaaaaagagacatggatattttatacatagatacggcaatcgaagctagcaccgctattgcgtacctcacgagacatactttcttagagattccacctgccgcgtctgatcccgaattatctcgttctaggtctgtgatatttgggttttatttcaacatcttaatgaaaggccttgaaaaaagtagtgatcgtgacaattacccagtattcttgaggcacaaaatgagtgtcctcaacgacaatgtaatactttctttaacaaatctttccaacaccaatgttgatgcgagtttgcagttcaccttaccgatgggctattccggaaatagaaacattaggaatgcatttttggaggtcttcattaatatcgttacgaactatagaacatacacggctaaaactgaccttggaaaattagaggcagcagacaaatttttgagatatacgattgaacatccccagttatcttcctttggagcagcggtttgtcccgctagcgatattgatgcttatgctgctggcttaataaatgcatttgaaacgaggaatgccacccacattgtagtggcacagttgattaaaaatgaaattgaaaaatcttccagacctacggatatccttagaagaaatagctgtgctacgagatctttatctatgttggccaggtccaagggtaacgaatatttgattcgcactttgcaaccattattgaaaaaaattatccagaacagagatttttttgaaattgagaaattgaaaccggaagattctgatgctgaacgtcaaatagagctcttcgttaaatacatgaatgaattattggaatccatatccaactccgtatcttattttccccctcctttattttatatttgccaaaacatttataaagttgcgtgtgaaaaatttccggatcacgcaattatcgccgctgggtctttcgtgtttttaagatttttttgtcctgctttagtcagccctgattctgaaaatatcatagatatttctcacttgagcgaaaagcgtaccttcatcagcttggctaaagttatccaaaatattgccaatggctctgaaaatttctccagatggccagctttgtgttcccaaaaggattttcttaaggaatgtagcgatagaattttcagattcttggctgaactttgtagaacagatcgcacgatagacatccaagtgagaacagacccaacgccaattgcatttgactatcaattccttcattcctttgtttacctttacggtcttgaggtgagaaggaatgtgttgaatgaagcaaaacatgatgatggtgacattgatggtgacgatttctataagaccacatttttacttattgatgatgttcttggccaattaggccaacctaaaatggaattttccaatgaaataccaatatacataagagaacatatggacgactatccggaattgtatgagttcatgaataggcacgcgttcagaaacattgagacttctacagcgtacagcccaagcgttcacgagtccacctctagtgaaggcattccaattattacgttaacaatgagtaatttcagtgacagacatgtggacattgatacagttgcttacaagttcttgcaaatttatgctagaatctggaccaccaaacactgtttaataatcgactgtacagaatttgacgagggagggcttgatatgaggaaatttatttctttggttatgggattattaccagaagttgcacccaaaaattgtataggctgttactactttaacgtaaacgagacatttatggataattatggaaaatgtttggacaaagacaacgtatatgtttcctctaaaattcctcattatttcattaatagtaactctgatgaaggacttatgaaatctgtgggtataactggacaagggttgaaggttttgcaagatattcgtgtctctttgcatgatatcacgctttatgacgaaaaaagaaatagatttacgccggtatctttgaaaataggcgatatttactttcaagtcttgcatgaaactcctaggcaatataaaataagggacatgggtactttattcgacgtaaaattcaatgatgtctacgaaattagcagaatatttgaagtacatgtttcttctataactggagtggcagctgaatttacagtaacttttcaggacgagagaaggttgatttttagtagtccgaaataccttgaaattgtgaagatgttctattacgcacagatcagattagaaagtgaatatgaaatggataataatagtagtacctcctccccaaatagcaacaacaaggacaaacagcagaaagagagaacaaaacttttgtgccacttgttattagtatctcttattggtttatttgatgagagtaaaaaaatgaaaaacagttcttataacttgatagctgccactgaggcgtcttttggtttgaactttggctcccattttcatcgctctcccgaggtgtacgtccccgaagatactacaacatttttaggtgttattggaaagtctcttgcagagtctaatccagaactcacagcctatatgtttatctatgttttggaggcattgaagaacaacgtaattcctcacgtttacatccctcataccatttgcggtttgtcttattggatccctaatttataccaacatgtgtatttggctgatgatgaagaaggccccgaaaacatatctcacattttcagaattcttatcaggctctctgtgagagagactgactttaaagccgtatacatgcaatatgtttggttgttacttttagatgatggccgcttaactgacattatcgttgatgaagttattaatcatgcgttagaaagagactccgaaaaccgcgattggaagaaaacaatatctttattaactgtcttgcccactactgaggttgctaataatattattcaaaaaatattggcaaaaattagatcttttttaccgtctttgaagttagaagctatgacccaaagttggtctgaattaacaatattagttaagataagcatccacgttttttttgaaacttctttgttagtacagatgtacttaccagagatcttatttatcgtatccttattaattgatgttggtccaagggaactcagaagttctttacaccagcttttaatgaatgtatgccattccttggctattaactctgctttaccacaagatcatagaaataatttggatgaaataagtgatatatttgcacatcaaaaggtgaagtttatgtttgggttcagcgaggacaaaggaagaattttacagatttttagcgcttcttcttttgcaagcaagtttaatattttagatttcttcatcaataatatattattgttgatggaatattcttctacgtacgaagcaaacgtgtggaagacaagatacaagaaatatgtcttggaatctgtgtttacaagtaattcttttctttctgcacgttccatcatgattgttggtataatgggtaaatcttacataactgaagggttatgcaaggctatgttaattgaaaccatgaaagttatcgccgaaccaaagattactgacgagcatcttttcttagccatatctcatatttttacttattccaaaattgttgaaggtttggatcccaaccttgacttaatgaagcacttattttggttttctacactcttccttgaatcccgtcacccgataatttttgagggtgcccttctctttgtgtctaactgtataaggcgcctttacatggcccagtttgaaaatgaaagcgaaacatctttgataagtactttacttaaggggagaaagtttgctcatacctttttaagcaagatagagaatcttagtggtattgtttggaatgaagataattttacacacattttaattttcatcattaataaaggattatccaatcctttcattaagagtacggcttttgatttcttgaagatgatgtttagaaactcctactttgagcatcaaatcaatcagaaatctgatcattatttgtgctatatgttcttgttgtattttgttttaaactgcaatcaatttgaggaacttttaggtgacgttgattttgaaggagaaatggttaacattgaaaacaagaacaccattcctaaaattttgttagagtggttgagttctgataacgaaaatgcaaacattaccctctatcaaggtgcgatattattcaaatgttctgttacggatgaaccaagtagatttaggtttgcgttgattattaggcatcttttgacaaagaaacccatttgtgcattgcgtttttacagtgttattcgtaacgaaataagaaaaatatctgcatttgagcaaaattctgattgtgttccacttgctttcgatattttaaacttattagtgacgcattctgagtctaattctttagaaaaacttcacgaagaatccattgaacgtttgaccaaaagaggtttatccattgtgacttcttctggtatatttgcgaagaactccgacatgatgatacctttagatgtaaaacctgaagatatctatgaacgtaagagaataatgacaatgattttatctaggatgtcctgttctgcttga

SEQ ID NO: 9979 - DNA, 870 bp, Saccharomyces cerevisiae
atggctctctcttcaaactggcaggcactattagcctccgaaagcaatcctacctccaatggaaagaataagcaatcaaataggaaaatcagaaacgttaagaaagttagcaaaacagtaaatgtcagtagtacaacccaatatgcccctcgaaagcgcaaaaacggcagtaaaattatggacatggtatataacatgaacaaggagattagtaagcatgagaaagacaagctcgagggaaaagtgtttgaattcaacccaaataaagcaaatactagtactactattaaagagccagtaaaagtgggtatttcggaagatactcgtattaatagtaataagagtaaagaaattgggaaatacatcgccatggattgtgaatttgtaggcgttggtcccgagggtaaagagtctgcgttagctagaatatcaatcgtaaattattttggacatgtcgtcctcgatgaatttgttaagccaagagagaaagttgtagaatggagaacttgggttagtggtattaaaccagagcatatgaaaaatgccattacattcaaagaagctcaaaaaaagactgcggatattctggaaggtagaattcttgtagggcacgctttaaagcatgatctcgaagcattgatgttatcccacccaaagtcactactcagggacacttcaagacacctcccattcaggaagttgtatgctaagggtaaaacacccagcttaaagaaattaaccagggaggttttaaaaatttccattcaagaaggtgagcattcttcagtcgaagatgctcgtgccaccatgctattatataaaaaggaaaaaacggaatttgaaaaaattcacagaaacactttcaactaa

SEQ ID NO: 9980 - DNA, 870 bp, Artificial Sequence
  Description of Artificial Sequence: Synthetic polynucleotide
atggctctctcttccaactggcaggcattattagcctccgaaagcaatcctacctccaatggaaagaataagcaaagcaataggaaaatcagaaacgttaagaaagttagcaaaacagtaaatgtcagtagtacaacccaatatgcccctagaaagcgcaaaaacggcagtaaaattatggacatggtatataacatgaacaaggagattagtaagcatgagaaagacaagctcgagggaaaagtgtttgaattcaacccaaataaagcaaatactagtactactattaaagagccagtaaaagtgggtatttctgaagatactcgtattaatagtaataagagtaaagaaattgggaaatacatcgccatggattgtgaatttgtaggcgttggtcccgagggtaaagagtctgcgttagctagaatatccatcgtaaattattttggacatgtcgtcctcgatgaatttgttaagccaagagagaaagttgtagaatggagaacttgggttagtggtattaaaccagagcatatgaaaaatgccattacattcaaagaagctcaaaaaaagactgcggatattttggaaggtagaattcttgtagggcacgctttaaagcatgatctcgaagcattgatgttatcccacccaaagtctttactcagggacacttccagacacctcccattcaggaagttgtatgctaagggtaaaacacccagcttaaagaaattaaccagggaggttttaaaaatttccattcaagaaggtgagcattcttctgtcgaagatgctcgtgccaccatgcttttatataaaaaggaaaaaacggaatttgaaaaaattcacagaaacactttcaactga

SEQ ID NO: 9981 - DNA, 3531 bp, Saccharomyces cerevisiae
atggacacggtgacggtattaaatgaactgcgggctcagtttctacgagtgtgtccggagaaagatcaaatgaaaagaataataaaaccgtacatacccgtagatgaattcaacacagagcagtgcttagattcttctatccgtgaattatatatgaactcagacggcgtaagcttgttacctgaactagagtctccaccggtatctaaggattttatggaaaactatgcttcattagggaaaatgaggataatgagggagaatgaaggccaaaaaggaaaggctaaccagaatttaataggagcagagaagactgaaagagacgaggaagaaacacgaaatttgcaagataaaagtgcaaaaaatactctgatagttgaagaaaatggaacacttcgttataatccacttaattcatctgcgtcgaactctcttttaaatgatgacgaccataccagtggaaaacatcacaaaacttcctcaaaggaagactcatatttaaatagttcgatggaaatgcagaagaaatctagtaagagatcgtcgcttcctttcgtgaggatattcaaaagtcgaagggaccactcaaatacttctggaaataaaaatgtcatgaatacaactaatacaagagcaaaatcatctactttgcatccacctggtgctcgccataataagaaaggcagtaaattcgatatgaacttcgatttcgatgaaaacttagaagaagaagatgatgacgacgacgatgacgaagaaggtgacgatatacactctcaattttttcagttagatgatgattttgatgctaagggttctggagcaagtccagcccacaaaggcatcaacggcatgtccaacaataaaaacaacacctacacaaataacagaaacagcatcagcattcttgatgatcgagagagttcaaatggcaatataggaagtgcttcaaggttaaaatctcatttccccacaagtcaaaaggggaaaatttttttaactgacaataaaaatgatggacaaaaatctgattcactgaatgccaataaaggtatacatggagatggaagcagcgccagcggtaacggatcggtgagtagggacggtttgacggaaacggaaagcaacaatatttccgatatggaatcttatatcaatgaaaaagatttagatgatttgaattttgatacagtgacctcaaacataaacaaaacagtatctgatttgggaggacatgaatctacaaatgatggaacggcggtcatgaacagggattcaaaagacagccgcagtaatagcaatgaattcaatgcacaaaatcgtgaccgaatcactcctggctcatcatatgggaagtcccttttaggatctgaatattccgaagaacgttattctaataacgactcgtcaaccatggagagcggtgaaatgtctcttgattcagacatgcaaactaatactataccctctcattccataccaatgtctatgcaaaaatatggcatctatcatggcgatgatgactctaccttaaacaatgtcttcgataaagccgtactgactatgaattcatcgcgacacccaaaagaaaggcgcgatactgttatatcaggaaaggagccaacatccttaaccagttctaatagaaaattttctgttagctcgaatttaacttcaacaaggtctcctcttttacgaggacatggaagaacttcatcgacggccagtagtgaacacatgaaagccccaaaggtttctgacagtgtattgcatagggcaaggaagagcacgttgacgttaaagcaggaccattctcaacctagtgttccatcaagtgtccataaaagctcgaaagaggggaacatccttattgagaaaaccaccgattatctagtgtcgaaaccgaaggcctcacagttatcgaatatgttcaacaaaaagaaaaagagaacaaatactaattctgtagatgtgttagaatatttttcatttgtttgcggagataaagtaccaaattatgaatcaatgggtctcgaaatatacattcaagcttccaaaaaatataaaagaaattccttcactaccaaagtccgaaaatcgtctaccatcttcgaagttattggatttgctttatttttgtattctactgagaaaaaaccggacaattttgaagaagatggattgacagttgaagacatttctaatcctaataacttctctttgaaaattgtcgatgaagacggtgaaccttttgaggataactttggtaaactagatagaaaaagcactattcaatcaatttcggacagcgaagttgttttatgtaaggttgatgatgccgagaagtctcaaaatgaaattgaaacacctttaccatttgaaactggtgggggcctaatggatgcttctactttggatgctaacagcagtcacgatacaactgacggaaccatcaaccaactaagtttctacaaacctattataggtaatgaagacgacatcgataagacaaacggttcgaaaatcattgatgtaacagtatatttgtatcctaacgtgaatcccaaatttaactatactaccataagtgttttagtgacctcacatataaacgatattttggtaaaatattgcaaaatgaaaaatatggatcctaatgaatatgcattaaaagttctaggaaagaactatatactggacttgaatgatacggtattaaggctcgatggtattaataaggtggaactcatctctaaaaaagatgcaagggagttgcatttggaaaaaatgaaacctgacctaaagaagcccgttttgccaacgatccaaagtaatgatctaactccgttaactttggagcctctgaactcttatctcaaagcagatgctggaggggctgtggctgccattcctgaaaacacgaaagttacatccaaagctaagaagatatccacgaagtataagctgggcttggcaaagcagcattcgtcatcaagtgttgctagtggaagtgtttcaacggctggcggtctcgccaatggaaatgggtttttcaagaacaagaattcatccaaatcctctttgcatgggacactgcagtttcataatataaaccgttctcagagtacgatggagcacacgcctgacactccaaatggagttggagataacttccaagatctttttaccggagcgtatcataaatataaggtatggagaaggcagcaaatgtcatttataaacaagcatgaaagaacactagccattgatggcgactacatatacattgtacccccggagggacgtatacattggcatgataatgtaaagactaagtcgttacacattagtcaagtggttcttgtcaaaaaatccaaaagagtccctgagcatttcaaaattttcgtaagaagagaggggcaagatgatatcaaaaggtactactttgaagcagtttcaggtcaagagtgtactgagatcgtgacgcgattacaaaacttattaagcgcttatagaatgaatcataaataa

SEQ ID NO: 9982 - DNA, 3531 bp, Artificial Sequence
  Description of Artificial Sequence: Synthetic polynucleotide
atggacacggtgacggtattaaatgaattaagagctcagtttttaagagtgtgtccggagaaagatcaaatgaaaagaataataaaaccgtacatacccgtagatgaattcaacacagagcagtgcttagattcttctatccgtgaattatatatgaacagcgacggcgtaagcttgttacctgaattagagtctccaccggtatctaaggattttatggaaaactatgcttctttagggaaaatgaggataatgagggagaatgaaggccaaaaaggaaaggctaaccagaatttaataggagcagagaagactgaaagagacgaggaagaaacaagaaatttgcaagataaaagtgcaaaaaatactttgatagttgaagaaaatggaacacttcgttataatccacttaattcttctgcgtccaactctcttttaaatgatgacgaccataccagtggaaaacatcacaaaacttcctccaaggaagactcttatttaaatagttctatggaaatgcagaagaaatctagtaagagatcttctcttcctttcgtgaggatattcaaaagtagaagggaccactctaatacttctggaaataaaaatgtcatgaatacaactaatacaagagcaaaatcttctactttgcatccacctggtgctcgccataataagaaaggcagtaaattcgatatgaacttcgatttcgatgaaaacttagaagaagaagatgatgacgacgacgatgacgaagaaggtgacgatatacactctcaattttttcagttagatgatgattttgatgctaagggttctggagcaagtccagcccacaaaggcatcaacggcatgtccaacaataaaaacaacacctacacaaataacagaaacagcatcagcattcttgatgatagagagagtagtaatggcaatataggaagtgcttccaggttaaaatctcatttccccacaagtcaaaaggggaaaatttttttaactgacaataaaaatgatggacaaaaatctgattctttgaatgccaataaaggtatacatggagatggaagcagcgccagcggtaacggatctgtgagtagggacggtttgacggaaacggaaagcaacaatatttccgatatggaatcttatatcaatgaaaaagatttagatgatttgaattttgatacagtgaccagtaacataaacaaaacagtatctgatttgggaggacatgaatctacaaatgatggaacggcggtcatgaacagggattctaaagacagccgcagtaatagcaatgaattcaatgcacaaaatcgtgacagaatcactcctggctcttcttatgggaagtcccttttaggatctgaatattccgaagaacgttattctaataacgactcttccaccatggagagcggtgaaatgtctcttgattctgacatgcaaactaatactataccctctcattccataccaatgtctatgcaaaaatatggcatctatcatggcgatgatgactctaccttaaacaatgtcttcgataaagccgtattgactatgaattcttctagacacccaaaagaaaggcgcgatactgttatatctggaaaggagccaacatccttaaccagttctaatagaaaattttctgttagcagtaatttaacttctacaaggtctcctcttttaagaggacatggaagaacttcttctacggccagtagtgaacacatgaaagccccaaaggtttctgacagtgtattgcatagggcaaggaagagcacgttgacgttaaagcaggaccattctcaacctagtgttccatctagtgtccataaaagcagtaaagaggggaacatccttattgagaaaaccaccgattatttggtgtctaaaccgaaggcctctcagttatccaatatgttcaacaaaaagaaaaagagaacaaatactaattctgtagatgtgttagaatatttttcttttgtttgcggagataaagtaccaaattatgaaagtatgggtctcgaaatatacattcaagcttccaaaaaatataaaagaaattccttcactaccaaagtcagaaaatcttctaccatcttcgaagttattggatttgctttatttttgtattctactgagaaaaaaccggacaattttgaagaagatggattgacagttgaagacatttctaatcctaataacttctctttgaaaattgtcgatgaagacggtgaaccttttgaggataactttggtaaattggatagaaaaagcactattcaatctatttctgacagcgaagttgttttatgtaaggttgatgatgccgagaagtctcaaaatgaaattgaaacacctttaccatttgaaactggtgggggcttaatggatgcttctactttggatgctaacagcagtcacgatacaactgacggaaccatcaaccaattgagtttctacaaacctattataggtaatgaagacgacatcgataagacaaacggttccaaaatcattgatgtaacagtatatttgtatcctaacgtgaatcccaaatttaactatactaccataagtgttttagtgaccagtcatataaacgatattttggtaaaatattgcaaaatgaaaaatatggatcctaatgaatatgcattaaaagttttaggaaagaactatatattggacttgaatgatacggtattaaggctcgatggtattaataaggtggaactcatctctaaaaaagatgcaagggagttgcatttggaaaaaatgaaacctgacttgaagaagcccgttttgccaacgatccaaagtaatgatttgactccgttaactttggagcctttgaactcttatctcaaagcagatgctggaggggctgtggctgccattcctgaaaacacgaaagttacatccaaagctaagaagatatccacgaagtataagttgggcttggcaaagcagcattcttcttccagtgttgctagtggaagtgtttccacggctggcggtctcgccaatggaaatgggtttttcaagaacaagaattcttccaaatcctctttgcatgggacattacagtttcataatataaaccgttctcagagtacgatggagcacacgcctgacactccaaatggagttggagataacttccaagatctttttaccggagcgtatcataaatataaggtatggagaaggcagcaaatgagttttataaacaagcatgaaagaacattggccattgatggcgactacatatacattgtacccccggagggacgtatacattggcatgataatgtaaagactaagtctttacacattagtcaagtggttcttgtcaaaaaatccaaaagagtccctgagcatttcaaaattttcgtaagaagagaggggcaagatgatatcaaaaggtactactttgaagcagtttctggtcaagagtgtactgagatcgtgacgagattacaaaacttattaagcgcttatagaatgaatcataaatga

SEQ ID NO: 9983 - DNA, 207 bp, Saccharomyces cerevisiae
atgggtgctgcttatcatttcatggggaaagctatccctccacaccaactagccattgggacattaggactgctaggtttattggttgttccaaatccttttaaaagcgcaaagccaaaaacagtcgacatcaaaacagacaacaaagacgaggaaaaattcattgaaaactacttaaagaaacattcggaaaagcaagatgcgtaa

SEQ ID NO: 9984 - DNA, 207 bp, Artificial Sequence
  Description of Artificial Sequence: Synthetic polynucleotide
atgggtgctgcttatcatttcatggggaaagctatccctccacaccaattggccattgggacattaggattattgggtttattggttgttccaaatccttttaaaagcgcaaagccaaaaacagtcgacatcaaaacagacaacaaagacgaggaaaaattcattgaaaactacttaaagaaacattctgaaaagcaagatgcgtga

SEQ ID NO: 9985 - DNA, 876 bp, Saccharomyces cerevisiae
atgtcttctatctacaaagccctcgcaggaaagagcaaagataataaatctgaaaagaagcaaggcaatgtcaagcaatttatgaacaagcaaagaactcttctgatttcgagtagaggtgttaactatagacatcgtcatttaattcaagacttaagcggattattgcctcattccagaaaggagccaaaattggatactaaaaaggatcttcaacagttgaacgaaatcgctgagttgtacaattgtaataatgttctattctttgaggccagaaaacaccaagatttgtatctatggttatccaagccgccaaatgggccaactataaaattttacattcaaaacttgcatactatggatgagttgaattttacaggtaactgtttaaagggttctcgtccggtattgtcgtttgatcaacgtttcgaatcctccccacactaccaattaattaaggagttgctagtgcataattttggtgtaccaccaaatgctagaaaatctaagccatttattgatcacgtcatgtccttcagtattgtagatgataaaatatgggtgaggacatatgagatctcacacagtactaagaacaaagaagaatatgaagatggcgaagaagacatatcattagtggaaattggccctaggtttgttatgactgtcattttgatcctagaaggttcatttggtggtccaaagatctatgaaaataaacaatatgtttcgccaaacgtcgtaagagctcaaattaaacaacaagctgctgaggaggcaaagtctagagctgaagctgctgtggaaagaaaaattaagagaagagagaatgttcttgccgccgatcctttatcaaacgatgccttgtttaaataa

SEQ ID NO: 9986 - DNA, 876 bp, Artificial Sequence
  Description of Artificial Sequence: Synthetic polynucleotide
atgtcttctatctacaaagccctcgcaggaaagagcaaagataataaatctgaaaagaagcaaggcaatgtcaagcaatttatgaacaagcaaagaactcttttgatttccagtagaggtgttaactatagacatcgtcatttaattcaagacttaagcggattattgcctcattccagaaaggagccaaaattggatactaaaaaggatcttcaacagttgaacgaaatcgctgagttgtacaattgtaataatgttttgttctttgaggccagaaaacaccaagatttgtatttatggttatccaagccgccaaatgggccaactataaaattttacattcaaaacttgcatactatggatgagttgaattttacaggtaactgtttaaagggttctcgtccggtattgagttttgatcaacgtttcgaatcctccccacactaccaattaattaaggagttgttggtgcataattttggtgtaccaccaaatgctagaaaatctaagccatttattgatcacgtcatgtccttcagtattgtagatgataaaatatgggtgaggacatatgagatcagccacagtactaagaacaaagaagaatatgaagatggcgaagaagacatatctttagtggaaattggccctaggtttgttatgactgtcattttgatcttggaaggttcttttggtggtccaaagatctatgaaaataaacaatatgtttctccaaacgtcgtaagagctcaaattaaacaacaagctgctgaggaggcaaagtctagagctgaagctgctgtggaaagaaaaattaagagaagagagaatgttcttgccgccgatcctttatctaacgatgccttgtttaaatga

SEQ ID NO: 9987 - DNA, 2391 bp, Saccharomyces cerevisiae
atgtccgacaagatacaggaggagatattaggactagtaagcaggtccaacttcaaacaatgctatgcaaaactggggcaattgcaaaaacaatttcccaatgcgttgtacttcaagattttggaaacctatgttaaattcaagcagtcacctggtaagttcgattacaataaactgctagaagaaccatatgggctgaaagggacaacgattacgggcgacacgcgttccttggagtttttgcacaacttcttcgtagagttagggaaatacgacgaagcattgcacgtgtatgaaagaggaaatttcaaattccctagctacgaattgtcttatcactggtttatgaaagcattggaagattccaattataaccaaatgagcaaagcatctctacagctagctaaatacagtgacagtggaaacctgcctaaaagagcatattatttttggaatgcaatctcgattttagccgtatcaaggtttcaggaaaacactctttcagatcccaagaaaattttgctctccaggctagcgcgccagtctttgttagacttgaaaccatttcaaaatgttcaagagattatagtttattgtttggtgttggatgaactattccctcaatctagagaaatctcggaagagattgttgcgattacctttgccaattttgatacttcagtaaacttgtatttgaaaaactttatcttgaagcataccaagttattgaattctccacaaaaactttttgaagtttgttcaaaacttattgaaaagggccttgatgattatgaattgatcacaaacttgattgatgctgcctacaaactttctaaatctaaagacgaagtcaaacaatggattgatgaaaatttgggagactcaaggaatactcgattggcgcgcttgaaacttgatataatgtacaccgattcggtttcggaatcatctttgtcgtactatttatcaaagtaccataacaaaccttgttgttcaatcgatttgaatcattacagcggccacattaacatagatatgcttaagagcattatgtctaagtacgatccagaggataaggatttgattcatcattgtaatattctagaattgggacttattggaagcgactcaatcaataactataacaagtttaaggggaccctggaaaaaaaatcggtaacggattattcctcctgttctacattcttattagaaatagtcaaggacaagtgcaagaaaactaatcctgaattgaaagacgtgcttttgtgtataacgatattggaaaattaccaagccaaggaccctcataacttcgatactatgtgctggctgattgttttatacatgtacctgggtttagttcccgatgcttatttccatttcataaacctaaagattaaaaacgttcaaacagattccctagattacatgatattctcgagattttctactttgttcccgaataaacagagcgatttttactccaagacattccatgaacataataatttatacgatacatcactggctaatttaccaagatatattcaggtggcattcgaaagaaattcatatagcaaaatactaggaatgctcgagatgagggataaactaatgaaatcctatacaagatggaccaaaactttagaaaacttacagttctcacgtttatgcaacgacaagcgcggccacctactacaaaaattacacgaagattggagatctttagaaatgacgcaaagtgtatcattttctgacaatagagacttttccatattagatgaaaattttgcccaatttcttaaccgtggtaaaattttggaatatgctaacttgaatgaagaatcaatttttctaactttgataagagaacttattattgaagctttgccaaatggggagaaaacggaacaaataagtgcgctcttaaaaaaacttccatcaattaaccttgaagagttgttgaataataatttaactgaagtggagtcagcgtcatttctgatttttttcgaaatttacgaaaataacggtaaaaatctacatgatttaatttctaggttgatgaaagtcccaataaatgcaaaacaaaactggatggtatcccatacttaccttactaaaatggcaaccttaaaaacactagacagtttgaagagaatcaaagataaagaaattcaaaaactaatcaaaaactccctcaaggagttgaggagttgttgcgatgatgtatttaaaggttattctaaagctttagtacaagcatatgaagaattaaaaaaagatgaatgtggcaacttgttaaaagaacttgatgttaaagctgaaaatgtcaagaacattaaaaattcattactaggcatccaaaaaagtgtaagaaatttatga

SEQ ID NO: 9988 - DNA, 2391 bp, Artificial Sequence
  Description of Artificial Sequence: Synthetic polynucleotide
atgtccgacaagatacaggaggagatattaggattagtaagcaggtccaacttcaaacaatgctatgcaaaattggggcaattgcaaaaacaatttcccaatgcgttgtacttcaagattttggaaacctatgttaaattcaagcagtctcctggtaagttcgattacaataaattattggaagaaccatatgggttgaaagggacaacgattacgggcgacacgcgttccttggagtttttgcacaacttcttcgtagagttagggaaatacgacgaagcattgcacgtgtatgaaagaggaaatttcaaattccctagctacgaattgtcttatcactggtttatgaaagcattggaagattccaattataaccaaatgagcaaagcatctttgcagttagctaaatacagtgacagtggaaacttgcctaaaagagcatattatttttggaatgcaatctctattttagccgtaagtaggtttcaggaaaacactctttctgatcccaagaaaattttgctctccaggttagcgcgccagtctttgttagacttgaaaccatttcaaaatgttcaagagattatagtttattgtttggtgttggatgaattattccctcaatctagagaaatcagtgaagagattgttgcgattacctttgccaattttgatacttctgtaaacttgtatttgaaaaactttatcttgaagcataccaagttattgaattctccacaaaaactttttgaagtttgttctaaacttattgaaaagggccttgatgattatgaattgatcacaaacttgattgatgctgcctacaaactttctaaatctaaagacgaagtcaaacaatggattgatgaaaatttgggagacagcaggaatactagattggcgcgcttgaaacttgatataatgtacaccgattctgtttctgaaagctctttgagttactatttatccaagtaccataacaaaccttgttgttctatcgatttgaatcattacagcggccacattaacatagatatgcttaagagcattatgtctaagtacgatccagaggataaggatttgattcatcattgtaatattttggaattgggacttattggaagcgactctatcaataactataacaagtttaaggggaccttagaaaaaaaatctgtaacggattattcctcctgttctacattcttattagaaatagtcaaggacaagtgcaagaaaactaatcctgaattgaaagacgtgcttttgtgtataacgatattggaaaattaccaagccaaggaccctcataacttcgatactatgtgctggttgattgttttatacatgtacttgggtttagttcccgatgcttatttccatttcataaacttgaagattaaaaacgttcaaacagattccttggattacatgatattcagtagattttctactttgttcccgaataaacagagcgatttttactccaagacattccatgaacataataatttatacgatacatctttggctaatttaccaagatatattcaggtggcattcgaaagaaattcttatagcaaaatattaggaatgctcgagatgagggataaattaatgaaatcctatacaagatggaccaaaactttagaaaacttacagttctctcgtttatgcaacgacaagcgcggccacttattacaaaaattacacgaagattggagatctttagaaatgacgcaaagtgtatccttttctgacaatagagacttttccatattagatgaaaattttgcccaatttcttaaccgtggtaaaattttggaatatgctaacttgaatgaagaaagtatttttttaactttgataagagaacttattattgaagctttgccaaatggggagaaaacggaacaaataagtgcgctcttaaaaaaacttccatctattaaccttgaagagttgttgaataataatttaactgaagtggagtctgcgtcttttttgatttttttcgaaatttacgaaaataacggtaaaaatttacatgatttaatttctaggttgatgaaagtcccaataaatgcaaaacaaaactggatggtatcccatacttaccttactaaaatggcaaccttaaaaacattagacagtttgaagagaatcaaagataaagaaattcaaaaattaatcaaaaactccctcaaggagttgaggagttgttgcgatgatgtatttaaaggttattctaaagctttagtacaagcatatgaagaattaaaaaaagatgaatgtggcaacttgttaaaagaacttgatgttaaagctgaaaatgtcaagaacattaaaaattctttattaggcatccaaaaaagtgtaagaaatttatga

SEQ ID NO: 9989 - DNA, 3885 bp, Saccharomyces cerevisiae
atgtcacagcaggagaatggtgatgtggccactgaattaatcgaaaatagactttccttctcaagaatccctagaataagccttcatgtaagggatttgtcaatcgttgcatccaaaacaaatacgacgctagttaatacgttttccatggacctgcccagtgggtcggtcatggcagttatgggtggttcggggtcagggaagactacgttgctgaatgttctggcatccaagatcagtggtgggttaactcataatggttctatacggtacgtattggaagatacaggttcagaacccaatgaaacagagcctaagagggctcacttggatggccaagaccatcccatccagaaacacgtaataatggcgtacctacctcaacaagatgtactctctcctaggttgacttgtagagaaactcttaagtttgcagctgatttgaaactaaactcttctgagcgaaccaagaaattaatggtcgagcaattaattgaagaattagggctcaaggattgtgccgatactcttgtgggggacaactcgcacaggggtctttctggtggtgaaaagagaagactaagtattggtactcaaatgatttcaaacccttccatcatgttcttagatgagcctaccactggactggatgcatattctgccttcttggttattaaaactttgaaaaaattagctaaagaagatggcaggacttttatcatgtcaattcatcagccgagatcggatatattgtttttattggaccaggtttgtattttgtcaaagggaaatgtggtatattgtgacaaaatggataatactatcccttattttgagtctattggttatcacgtaccccagctggtaaatccagcagattatttcattgatttatcaagcgtagactctagatctgataaagaagaagctgccacgcaaagtcggctaaattcattgattgatcattggcatgattatgagagaactcatttgcaactacaggcagaatcttatataagcaacgcaacggaaattcaaattcagaatatgactaccagactgccattttggaagcaagttacggtgctaacaaggcgaaatttcaaattaaatttttcagattacgttactttaatatctacttttgcagaaccgttgattattggtactgtttgcggttggatttactataaacctgacaaaagcagtataggtggtttaaggacaacaaccgcatgtctttacgcgtccacaattttgcaatgttacttgtatttgctttttgatacttatcgactttgtgagcaggatattgcgttatatgacagagaaagagcagagggctcggtaacacctttggcattcatcgtagctagaaaaatttcacttttcctctctgacgatttcgcgatgaccatgatttttgtcagtataacatattttatgtttggattggaagcagatgcaaggaagtttttttatcagtttgctgttgtatttttatgtcagctatcatgttccggtttatctatgttatcggtggcggtatcgagagatttttctaaagcttcattagtaggaaatatgacatttacggtattatcgatgggatgtggttttttcgttaatgctaaagtaatgcccgtgtatgttcgttggattaaatatattgcctttacgtggtattcattcggtactctcatgtcaagcacctttacgaattcgtactgtactacagataatctcgatgagtgcttgggtaaccagatattggaagtttacgggtttcctaggaattggataaccgtacctgccgttgtcttactttgctggtctgtgggatattttgtagtaggtgcaattattttatatttgcacaagattgatataactttacaaaatgaagtgaaatcgaagcaaaaaaaaatcaaaaagaaatccccaacaggaatgaaacccgagattcagctgctagatgacgtgtatcatcagaaagatttggaagcggagaaaggaaaaaatatacatattactataaaattagaagatatagacttacgagtcattttttctgcccctttctcaaactggaaagaaggcaacttccaccatgaaacaaaagaaattctacaatcagttaatgccattttcaaacctggaatgattaatgcaattatggggccatcagggtctggaaagtcttctctgttaaacctaatctccggaagattaaaatcttcggtctttgccaaatttgacacttcaggttcaataatgttcaatgatattcaagtttcagagcttatgtttaaaaatgtatgctcgtatgtctcgcaggatgatgaccaccttttggcagctttaaccgttaaagaaaccctgaaatatgccgctgcattaagattgcatcatctgactgaggcagaacgaatggagagaactgacaacctaataaggtctttgggtttaaagcattgtgaaaacaatatcattggtaatgaatttgttaaaggtataagcggtggtgaaaaaagaagagtaactatgggtgtgcaattattaaacgatcctccgatattattgctagatgaaccaacttcagggttagatagcttcacatccgctactatactggaaattttggagaagttatgtagggaacagggcaagacgatcatcattaccattcatcaaccaaggtcagaattattcaagagatttggtaatgttttgctattagctaaatcgggtagaactgctttcaatggatcaccagatgaaatgattgcttatttcactgaattgggatataactgtccttcgtttacgaacgtggcagatttctttcttgatttaatttcagttaatacccagaacgaacagaatgaaataagctcaagggcacgagtagaaaagatacttagtgcatggaaagctaatatggataacgaaagcctttcaccaaccccaatttctgaaaaacaacaatactctcaggagtcatttttcacagaatacagcgagtttgtaagaaaaccagctaatttggttttggcgtacatagtgaacgttaaaaggcaatttactacgacaaggagaagttttgactctttgatggcgcgtattgcacaaattccaggattaggtgttattttcgcattattctttgccccagtcaagcataattatacaagtattagcaatcgtctaggattggcacaagaatctacagcactatattttgtgggcatgctggggaacttggcatgttatccaactgaaagagattacttttacgaagaatataatgataatgtttatggtatagcaccttttttcttagcttatatgacattagagttgccgctatccgcattagcttcagtgttatacgcggtatttacagtactggcatgtgggttaccaagaactgcaggcaacttctttgcaaccgtctactgttcctttattgttacctgttgtggcgaagctcttggtataatgacaaatacatttttcgaaaggccaggcttcgtcgttaactgcatttccattattttatccattggtactcagatgtcagggttaatgtcactaggcatgtcgagagtattaaagggttttaactatttgaaccctgtagggtatacatctatgatcatcattaatttcgcattcccaggtaatttgaaattaacctgcgaagatggcgggaaaaattcagacggtacttgtgaatttgcgaatggccatgatgtgttggtttcttatggtttagtcagaaatacgcaaaagtacctgggaatcattgtgtgcgtagccataatttatcgccttattgcattttttattttaaaagcaaaattggagtggataaaatggtga

SEQ ID NO: 9990 - DNA, 3885 bp, Artificial Sequence
  Description of Artificial Sequence: Synthetic polynucleotide
atgtctcagcaggagaatggtgatgtggccactgaattaatcgaaaatagactttccttcagtagaatccctagaataagccttcatgtaagggatttgtccatcgttgcatccaaaacaaatacgacgttagttaatacgttttccatggacttgcccagtgggtctgtcatggcagttatgggtggttctgggtctgggaagactacgttgttgaatgttttagcatccaagatcagtggtgggttaactcataatggttctataagatacgtattggaagatacaggttctgaacccaatgaaacagagcctaagagggctcacttggatggccaagaccatcccatccagaaacacgtaataatggcgtacttacctcaacaagatgtactctctcctaggttgacttgtagagaaactcttaagtttgcagctgatttgaaattgaactcttctgagagaaccaagaaattaatggtcgagcaattaattgaagaattagggctcaaggattgtgccgatactcttgtgggggacaactctcacaggggtctttctggtggtgaaaagagaagattaagtattggtactcaaatgatttccaacccttccatcatgttcttagatgagcctaccactggattagatgcatattctgccttcttggttattaaaactttgaaaaaattagctaaagaagatggcaggacttttatcatgtctattcatcagccgagaagtgatatattgtttttattggaccaggtttgtattttgtccaagggaaatgtggtatattgtgacaaaatggataatactatcccttattttgagtctattggttatcacgtaccccagttggtaaatccagcagattatttcattgatttatccagcgtagactctagatctgataaagaagaagctgccacgcaaagtagattgaattctttgattgatcattggcatgattatgagagaactcatttgcaattgcaggcagaatcttatataagcaacgcaacggaaattcaaattcagaatatgactaccagattaccattttggaagcaagttacggtgttaacaaggagaaatttcaaattaaatttttctgattacgttactttaatatctacttttgcagaaccgttgattattggtactgtttgcggttggatttactataaacctgacaaaagcagtataggtggtttaaggacaacaaccgcatgtctttacgcgtccacaattttgcaatgttacttgtatttgctttttgatacttatagactttgtgagcaggatattgcgttatatgacagagaaagagcagagggctctgtaacacctttggcattcatcgtagctagaaaaatttctcttttcctctctgacgatttcgcgatgaccatgatttttgtcagtataacatattttatgtttggattggaagcagatgcaaggaagtttttttatcagtttgctgttgtatttttatgtcagttaagttgttccggtttatctatgttatctgtggcggtatctagagatttttctaaagcttctttagtaggaaatatgacatttacggtattatctatgggatgtggttttttcgttaatgctaaagtaatgcccgtgtatgttcgttggattaaatatattgcctttacgtggtattctttcggtactctcatgtctagcacctttacgaattcttactgtactacagataatctcgatgagtgcttgggtaaccagatattggaagtttacgggtttcctaggaattggataaccgtacctgccgttgtcttactttgctggtctgtgggatattttgtagtaggtgcaattattttatatttgcacaagattgatataactttacaaaatgaagtgaaatccaagcaaaaaaaaatcaaaaagaaatccccaacaggaatgaaacccgagattcagttgttggatgacgtgtatcatcagaaagatttggaagcggagaaaggaaaaaatatacatattactataaaattagaagatatagacttaagagtcattttttctgcccctttcagtaactggaaagaaggcaacttccaccatgaaacaaaagaaattttacaatctgttaatgccattttcaaacctggaatgattaatgcaattatggggccatctgggtctggaaagtcttctttattaaacttgatctccggaagattaaaatcttctgtctttgccaaatttgacacttctggttccataatgttcaatgatattcaagtttctgagcttatgtttaaaaatgtatgctcttatgtctcccaggatgatgaccaccttttggcagctttaaccgttaaagaaaccttgaaatatgccgctgcattaagattgcatcatttgactgaggcagaaagaatggagagaactgacaacttgataaggtctttgggtttaaagcattgtgaaaacaatatcattggtaatgaatttgttaaaggtataagcggtggtgaaaaaagaagagtaactatgggtgtgcaattattaaacgatcctccgatattattgttggatgaaccaacttctgggttagatagcttcacatccgctactatattggaaattttggagaagttatgtagggaacagggcaagacgatcatcattaccattcatcaaccaaggtctgaattattcaagagatttggtaatgttttgttattagctaaatctggtagaactgctttcaatggatctccagatgaaatgattgcttatttcactgaattgggatataactgtccttcttttacgaacgtggcagatttctttcttgatttaatttctgttaatacccagaacgaacagaatgaaataagcagtagggcaagagtagaaaagatacttagtgcatggaaagctaatatggataacgaaagcctttctccaaccccaatttctgaaaaacaacaatactctcaggagtcttttttcacagaatacagcgagtttgtaagaaaaccagctaatttggttttggcgtacatagtgaacgttaaaaggcaatttactacgacaaggagaagttttgactctttgatggcgcgtattgcacaaattccaggattaggtgttattttcgcattattctttgccccagtcaagcataattatacaagtattagcaatcgtttaggattggcacaagaatctacagcattatattttgtgggcatgttggggaacttggcatgttatccaactgaaagagattacttttacgaagaatataatgataatgtttatggtatagcaccttttttcttagcttatatgacattagagttgccgttatccgcattagcttctgtgttatacgcggtatttacagtattggcatgtgggttaccaagaactgcaggcaacttctttgcaaccgtctactgttcctttattgttacctgttgtggcgaagctcttggtataatgacaaatacatttttcgaaaggccaggcttcgtcgttaactgcatttccattattttatccattggtactcagatgagtgggttaatgtctttaggcatgagtagagtattaaagggttttaactatttgaaccctgtagggtatacatctatgatcatcattaatttcgcattcccaggtaatttgaaattaacctgcgaagatggcgggaaaaatagtgacggtacttgtgaatttgcgaatggccatgatgtgttggtttcttatggtttagtcagaaatacgcaaaagtacttgggaatcattgtgtgcgtagccataatttatcgccttattgcattttttattttaaaagcaaaattggagtggataaaatggtga

SEQ ID NO: 9991 - DNA, 969 bp, Saccharomyces cerevisiae
atgtctatggagcctcctgtggggcttacggctatgcccgtcaccaagctagccatgatcacgacgcttgtggttcccttagttgcctcgattgcaagttacaaacatatatttctattgcaatatgatccttttctgcagacctaccatcaatactaccgtctgctcatattccagttctgcgccatcaatgaatccgatacagtaatactggcgttgatatggtatctgtttaggcatttagaacggctactaggatcccacaagtacttgaccttgattgttttgtcatgggcctacaccaccttaggaatttggggattgaatctgatctggaacgcatttattggacagtacaagtggcttcaatggaacaattttagtacaggttcactgcccattgttttaagcttagtacatttttacaaagaatacacccctcagatttacgaatggaatataagattactaggacctcgaggaggagcatcaagtcacaatgataacaagcgagaagacaagagcgccgtagagtggaaaatcaacgatcagtttcttttaaatgggttaattctcctgcttatattaaatcaggggtttgcaggaatactatgcggattcataagctggatgtgtggtattttcatcgataagggcctgttaccgggattagaccattggagaataccgtttgtatcctatttcatctctcaaggcccacccacgagggctaacgttgctatagcggccaatgcggccacgaatacagcagcagcaagagccactgtagaagcagctactgctgctacaggaaatggaaatacaggcaactctgggcctacaagcctaccgcttcgtggttcaagcaccacccctacaaatacctctagcgctggtgatgacgagcctggtgccgatgaacctgcaagaccactgggagtccaatttttggatacctttaggagatga

SEQ ID NO: 9992 - DNA, 969 bp, Artificial Sequence
  Description of Artificial Sequence: Synthetic polynucleotide
atgtctatggagcctcctgtggggcttacggctatgcccgtcaccaagttggccatgatcacgacgcttgtggttcccttagttgcctctattgcaagttacaaacatatatttttattgcaatatgatccttttttgcagacctaccatcaatactaccgtttgctcatattccagttctgcgccatcaatgaatccgatacagtaatattggcgttgatatggtatttatttaggcatttagaaagattattaggatcccacaagtacttgaccttgattgttttgtcctgggcctacaccaccttaggaatttggggattgaatttgatctggaacgcatttattggacagtacaagtggcttcaatggaacaattttagtacaggttctttacccattgttttaagcttagtacatttttacaaagaatacacccctcagatttacgaatggaatataagattattaggacctagaggaggagcaagtagtcacaatgataacaagagagaagacaagagcgccgtagagtggaaaatcaacgatcagtttcttttaaatgggttaattctcttacttatattaaatcaggggtttgcaggaatattgtgcggattcataagctggatgtgtggtattttcatcgataagggcttattaccgggattagaccattggagaataccgtttgtatcctatttcatctctcaaggcccacccacgagggctaacgttgctatagcggccaatgcggccacgaatacagcagcagcaagagccactgtagaagcagctactgctgctacaggaaatggaaatacaggcaactctgggcctacaagcttaccgcttcgtggttccagcaccacccctacaaatacctctagcgctggtgatgacgagcctggtgccgatgaacctgcaagaccattaggagtccaatttttggatacctttaggagatga

SEQ ID NO: 9993 - DNA, 1368 bp, Saccharomyces cerevisiae
atggacatggccaaccagttgctagatgaattagcacatggaaatttttcccacctaacgctaaacttgtcccaaaatggtagggaaattgctatcttacagaagcaattgaccggatttgatgataaacagctagaaacgtttgtagaacaacacccggctatgcccaatgatacgagattcaaaatcatgtgtacatcctttttaaattatgcccgagatgtcgacccatggtcagcctggtccagttcggatctaatttttgagttttatcaatgtttaatcaactgtctcatcaacgacaatgctcctcacatagaaatgttgataccagtagcaactagagaaacagaatttatcatcaatctcgctgggaaactagactctttccacttgcaactgcatacgagaagtcaccaatttctatcacatatatcgtccatcctatcaagactatttaacagcatcaaacctccacgaggtaacgcatcttctacaaatatacctggaaaacaacgaatactgctctacctggtcaataaactaaataacatctacttcaggatcgagtcaccgcaattatgttccaatatctttaagaactttcagccaaaaagcatgcttgcacatttcaacgaataccagctcgaccagcaaatagaatacagatatctattaggaaggtactacttgttgaactctcaagtacataatgccttcgttcaattcaatgaagctttccagtccttattgaacttgccgttaacgaaccaagcgatcactaggaatggcaccagaatactaaattacatgatccctacagggctgatactgggaaagatggtcaaatggggaccgttgcgaccgttcctttcccaagaaacaattgataattggagtgttctctacaaacacgtacgttatgggaatattcaaggcgtgagtctctggctgagacaaaacgagcgtcatttgtgtgcaagacagttactgatcgtgctcctagagaaactgcccatggtaacgtacagaaatctgattaaaacggtaataaagtcctggaccaccgaatggggtcagaacaaattaccgtactccttgatagaacgggtactacagctatctattggtccgacattcgaggatcccggcgcccaggaaattaccatttataatggcattcactcccccaagaacgtcgaaaacgtacttgtgacactgattaacttgggacttttacgcgcaaactgtttcccacagttacaactgtgtgtagtgaaaaagactacaatgatacaagagattgttccgccggttaatgaacgaatcaccaagatgtttcctgcccattctcacgttctttggtga

SEQ ID NO: 9994 - DNA, 1368 bp, Artificial Sequence
  Description of Artificial Sequence: Synthetic polynucleotide
atggacatggccaaccagttgttggatgaattagcacatggaaatttttcccacttaacgttgaacttgtcccaaaatggtagggaaattgctatcttacagaagcaattgaccggatttgatgataaacagttagaaacgtttgtagaacaacacccggctatgcccaatgatacgagattcaaaatcatgtgtacatcctttttaaattatgccagagatgtcgacccatggtctgcctggtccagttctgatttgatttttgagttttatcaatgtttaatcaactgtctcatcaacgacaatgctcctcacatagaaatgttgataccagtagcaactagagaaacagaatttatcatcaatctcgctgggaaattagactctttccacttgcaattgcatacgagaagtcaccaatttttatctcatatatcttccatcttatctagattatttaacagcatcaaacctccaagaggtaacgcatcttctacaaatatacctggaaaacaaagaatattactctacttagtcaataaattgaataacatctacttcaggatcgagtctccgcaattatgttccaatatctttaagaactttcagccaaaaagcatgcttgcacatttcaacgaataccagctcgaccagcaaatagaatacagatatcttttaggaaggtactacttgttgaactctcaagtacataatgccttcgttcaattcaatgaagctttccagtccttattgaacttgccgttaacgaaccaagcgatcactaggaatggcaccagaatattgaattacatgatccctacagggttgatattaggaaagatggtcaaatggggaccgttgagaccgttcctttcccaagaaacaattgataattggagtgttctctacaaacacgtacgttatgggaatattcaaggcgtgagtctctggttgagacaaaacgagcgtcatttgtgtgcaagacagttattgatcgtgctcttggagaaattgcccatggtaacgtacagaaatttaattaaaacggtaataaagtcctggaccaccgaatggggtcagaacaaattaccgtactccttgatagaaagagtattacagctttctattggtccgacattcgaggatcccggcgcccaggaaattaccatttataatggcattcactcccccaagaacgtcgaaaacgtacttgtgacattaattaacttgggacttttacgcgcaaactgtttcccacagttacaattatgtgtagtgaaaaagactacaatgatacaagagattgttccgccggttaatgaaagaatcaccaagatgtttcctgcccattctcacgttctttggtga

SEQ ID NO: 9995 - DNA, 489 bp, Saccharomyces cerevisiae
atgcacaatatgtttccagcactcacaaagacactgtcgttgcaaggctacaagattatcaactctcaaacagggtccgctgcatggtcgtgcggtcgtaggtggtttagtagtgataaagatgaccacgacgatgtggtgacgaggattaaaattgcccccataaagagaactaacgagccattggataagaaaagagctcggttgatatatcaatcacgcaaaagagggatcttggagacggacttgctgctatctgggttcgctgccaaatatttgaagaagatgaacgaagaggaactggaagaatacgattcgctattgaatgagttggactgggacatatactattgggccacaaaaaatttcaaaaccagccccttgcctgacaagtgggccaattctaaattgctgaagcagctacaagaattcagtgaaaataaagagaaggaaattttaagtatgccggacttgtccaagtatcaatga

SEQ ID NO: 9996 - DNA, 489 bp, Artificial Sequence
  Description of Artificial Sequence: Synthetic polynucleotide
atgcacaatatgtttccagcactcacaaagacattatctttgcaaggctacaagattatcaactctcaaacagggtccgctgcatggtcctgcggtcgtaggtggtttagtagtgataaagatgaccacgacgatgtggtgacgaggattaaaattgcccccataaagagaactaacgagccattggataagaaaagagctagattgatatatcaaagtcgcaaaagagggatcttggagacggacttgttattatctgggttcgctgccaaatatttgaagaagatgaacgaagaggaattggaagaatacgattctttgttgaatgagttggactgggacatatactattgggccacaaaaaatttcaaaaccagccccttgcctgacaagtgggccaattctaaattgttgaagcagttacaagaattcagtgaaaataaagagaaggaaattttaagtatgccggacttgtccaagtatcaatga

SEQ ID NO: 9997 - DNA, 1506 bp, Saccharomyces cerevisiae
atgtcagaagagagggaagaaaacgggatatctagggctacgctgaatacgcagcgactttcagcaatgatcgattcactgaacaatgagaaagatgacaggctctttccatctcccacaactaccaggacaatgatcacagaggaaaaggcggatcaaagtgatgtctttaaaccaccatcgagattgttgagatcacctgctggtgacgtttcgctgccacctggtgataacagatcaagtatgatttccaactactctggaattattcaagaaggcgttgaagtatcatatgtggtcaaaaaccggcaacagacccaagaacggcgcacaagtaaggattccaatagtttgtactccttgaaagagcccgtgagcaagaacgagttaccgtcgttgcccatgttgccttcagaagcgacattgacaaaacatctaagtgataaccaaagcacaaaatcgaataccaatgcagacgaaattgtcattaaaccagttactaatgccaaacctgtgggaaggtttaactctaacacttcaaaaaaagtagagggtcgtggctcactgaaactgttatctagtcctctacgtcaggaaaaagttatgcgttcctctataggatcaggtaatttggccagcgagagcggatcttccacttataataccaaattccatcaatctattcaagagcagctcgaagaagaagaggaaggaaatgttagcgataagctttcaattgtttccagtgtcatacccgagttgtatacaaccaccaacgaagcacccaaagcgataaacccaatacgttctgaaaccaatgactacaatccaactattccgcccagaagtaaggaccgtcctaggtcaaggttgttcatcgaagaaggtgatggcgagggggatcttttaaccgaagaaatattaccaacgccggtccaacctggtggccactataagaactcatctcagatttccacagttagtgaacaaaaatcggaatcttactattctgcggcaacgagtatgcctccagaggaagagacttacttgacaagaccattgcccagcacacccaatgaggatagcagagttacatcgaatttgaaacgtgacgacacattgaaggctattcatgatagggcaaatcatacctctacttcgacaaacaaacaagatgatgacatgtacgaggacatcattgaggaaacgcccaagaaaactaaactcaagaaggatacgaaaaaaaagctcaataaaaaaaaatctgtgaaggaattgcgatcctttgatatcgacacactaaatcaactgttgagtgtgacaaagggaaccttaatcgggtctgaatttgcgcaactggggatgaaaattgaggagaaacgtgccctggagagactagtagactctttgtccaggttaacagcagacatggttcttgatccggaccgctatgaagaaggactgaaaagattagacaaagctacaaaggctcttgaagggttttga

SEQ ID NO: 9998 - DNA, 1506 bp, Artificial Sequence
  Description of Artificial Sequence: Synthetic polynucleotide
atgtctgaagagagggaagaaaacgggatatctagggctacgttgaatacgcagagactttctgcaatgatcgattctttgaacaatgagaaagatgacaggctctttccatctcccacaactaccaggacaatgatcacagaggaaaaggcggatcaaagtgatgtctttaaaccaccatctagattgttgagatctcctgctggtgacgtttctttaccacctggtgataacagaagtagtatgatttccaactactctggaattattcaagaaggcgttgaagtatcttatgtggtcaaaaacagacaacagacccaagaaaggcgcacaagtaaggattccaatagtttgtactccttgaaagagcccgtgagcaagaacgagttaccgtctttgcccatgttgccttctgaagcgacattgacaaaacatttgagtgataaccaaagcacaaaatctaataccaatgcagacgaaattgtcattaaaccagttactaatgccaaacctgtgggaaggtttaactctaacacttctaaaaaagtagagggtcgtggctctttgaaattattatctagtcctttacgtcaggaaaaagttatgcgttcctctataggatctggtaatttggccagcgagagcggatcttccacttataataccaaattccatcaatctattcaagagcagctcgaagaagaagaggaaggaaatgttagcgataagctttctattgtttccagtgtcatacccgagttgtatacaaccaccaacgaagcacccaaagcgataaacccaatacgttctgaaaccaatgactacaatccaactattccgcccagaagtaaggaccgtcctaggagtaggttgttcatcgaagaaggtgatggcgagggggatcttttaaccgaagaaatattaccaacgccggtccaacctggtggccactataagaactcttctcagatttccacagttagtgaacaaaaaagtgaatcttactattctgcggcaacgagtatgcctccagaggaagagacttacttgacaagaccattgcccagcacacccaatgaggatagcagagttacaagtaatttgaaacgtgacgacacattgaaggctattcatgatagggcaaatcatacctctacttctacaaacaaacaagatgatgacatgtacgaggacatcattgaggaaacgcccaagaaaactaaactcaagaaggatacgaaaaaaaagctcaataaaaaaaaatctgtgaaggaattgcgttcctttgatatcgacacattaaatcaattattgagtgtgacaaagggaaccttaatcgggtctgaatttgcgcaattagggatgaaaattgaggagaaacgtgccttagagagattggtagactctttgtccaggttaacagcagacatggttcttgatccggaccgctatgaagaaggattgaaaagattagacaaagctacaaaggctcttgaagggttttga

SEQ ID NO: 9999 - DNA, 1356 bp, Saccharomyces cerevisiae
atgagtaggaatcaagatgtgttccccattttggatctacaggaactagttatatgtttgcaaagctgtgattttgcgctagccacacaggaaaatatctctaggcccacctcagactacatggtaaccctttacaaacaaatcatcgagaacttcatgggtatttctgtagagtcgttgctgaatagtagtaaccaagaaacaggggatggtcacttacaggaagagaacgagaacatttatttggacacgttaaatgttttggtattgaacaaaatctgctttaagttctttgagaacataggtgttcaagatttcaatatgacagatttgtacaagcccgaagcccaacggacacagcgcttactgagtgctgtggtgaattacgctcgttttagggaggaacgaatgttcgactgtaattcttttattcttcaaatggaatcgttgctgggtcagcttcgctccaaattcgatgattataacttgattcagcaacagctaaagcaatacgaggacgtagatggggataatatacctgatgagcaagagctccaaaagctggaagagcaaaataaggagctggaaattcagttgaagaaattgaccaagatccaagaaacgttatccatagattataatgactataagatctccaagcagtcaatctttaaagatctggaagctctgagtttccaaatagtggaattagagtccaatcgagataaactgatcaaaatatccaatacagacatggaagagttatccgagggaatcaaagagctaaatgatctgttgatacaaaggaaaaagacgttagacgacttaaccgcacaacagaaaaacttgcaagatacagtgacgacgttcgaaaccataattagtgagctctatgatgtgctgagaataatttccagcgaggtgcaagagtctaatcgaactgaaacggaacttgtgggattaaagcaaaatttaatcaacaataagctgaaattgatgaatgtattggaaacaggtattatgtataaattagaaatcttacaagaacagttagatttgcaactcaagaatttggaaaagctatcgcaagatactaaagaagagtcgcgcctaaatgatactaaattgatggatctacaaatcaaatatgaaaatgaaatcaaacctaagattgacaaaacggacattttcattcaagaggaactgatcagtggtaaaatcaataaattaaatgatgaaattaaacaattacaaaaagatttcgaagttgaagttaaagaaattgagattgaatattctttattatctggtcatattaataaatacatgaatgaaatgctcgaatatatgcaatag

SEQ ID NO: 10000 - DNA, 1356 bp, Artificial Sequence
  Description of Artificial Sequence: Synthetic polynucleotide
atgagtaggaatcaagatgtgttccccattttggatttacaggaattggttatatgtttgcaaagctgtgattttgcgttggccacacaggaaaatatctctaggcccaccagtgactacatggtaaccctttacaaacaaatcatcgagaacttcatgggtatttctgtagagtctttgttgaatagtagtaaccaagaaacaggggatggtcacttacaggaagagaacgagaacatttatttggacacgttaaatgttttggtattgaacaaaatctgctttaagttctttgagaacataggtgttcaagatttcaatatgacagatttgtacaagcccgaagcccaaagaacacagcgcttattaagtgctgtggtgaattacgctcgttttagggaggaaagaatgttcgactgtaattcttttattcttcaaatggaatctttgttgggtcagcttcgctccaaattcgatgattataacttgattcagcaacagttgaagcaatacgaggacgtagatggggataatatacctgatgagcaagagctccaaaagttggaagagcaaaataaggagttagaaattcagttgaagaaattgaccaagatccaagaaacgttatccatagattataatgactataagatctccaagcagtctatctttaaagatttggaagctttaagtttccaaatagtggaattagagtccaatagagataaattaatcaaaatatccaatacagacatggaagagttatccgagggaatcaaagagttgaatgatttattgatacaaaggaaaaagacgttagacgacttaaccgcacaacagaaaaacttgcaagatacagtgacgacgttcgaaaccataattagtgagctctatgatgtgttgagaataatttccagcgaggtgcaagagtctaatagaactgaaacggaacttgtgggattaaagcaaaatttaatcaacaataagttgaaattgatgaatgtattggaaacaggtattatgtataaattagaaatcttacaagaacagttagatttgcaactcaagaatttggaaaagctttctcaagatactaaagaagagtcccgcttgaatgatactaaattgatggatttgcaaatcaaatatgaaaatgaaatcaaacctaagattgacaaaacggacattttcattcaagaggaattgatcagtggtaaaatcaataaattaaatgatgaaattaaacaattacaaaaagatttcgaagttgaagttaaagaaattgagattgaatattctttattatctggtcatattaataaatacatgaatgaaatgctcgaatatatgcaatga

SEQ ID NO: 10001 - DNA, 1512 bp, Saccharomyces cerevisiae
atgaacatattgctaatgcaacggatagttagttttattttggtggttagtcaagggcgatactttcatgttggagagctgaccatgacaatgttgaaaagacctcaagaagaagagtcagataataatgctacgaagaagctgaaaacgagattaacgtacccttgtatcctcgggaaggataaggtgacgggcaaattcatctttcctgcaatcactaaagatgatgttatgaatgcaagactgtttttgaaggacaacgatttgaaaacttttttagaatattttttgccagtggaagtcaactcgatctacatttatttcatgataaaattgctgggattcgacgtcaaagataaagaactatttatggcgttaaactctaatatcacttctaataaagaacgttctagtgcggaactatcgtctatacatgcaaaagctgaagatgaggacgagttgaccgatcccttagagaaaaagcatgcagtaaaattaatcaaagatttacaaaaagccataaataaagtccttagtacaaggcttcgattacccaacttcaatacgattgatcatttcaccgccactttgcgtaacgccaaaaaaattttggttctgacgggcgctggagtttccacttctttaggtattcccgattttagatcatctgaggggttttattctaagatccgacaccttggattggaagaccctcaggatgttttcaacttggatatattcttacaggacccttctgttttttacaatattgcccatatggttttaccaccagagaacatgtattctccgttgcacagcttcattaaaatgctacaagacaagggcaaactattaagaaactacacacagaatatagataacttagaatcgtatgcagggatagatcctgataaattagtgcaatgtcacggttcattcgccactgcatcttgtgtgacttgccattggcaaatacctggtgagaaaatattcgaaaatattagaaaccttgaactaccattatgtccctactgttatcaaaaaagaaaacaatattttcctatgagtaatggcaataatacggtgcaaacaaacataaatttcaactcacccattttaaagtcgtatggtgttttgaaaccagacatgacattttttggcgaggccctgccatcgcgatttcataagaccatccgcaaagatatactggaatgcgatctattgatttgtataggaacaagtttgaaagtggctcctgtgtctgaaattgtcaatatggtaccttcacatgttccgcagattttgatcaatagggatatggttacacatgcagagtttgacttaaacctgttgggattctgtgatgacgtggccagtctcgtagctaaaaaatgccattgggatataccgcataaaaaatggcaagatctaaagaagatagattacaactgtacggaaatagataaaggtacgtataagattaagaaacagccacgaaagaaacaacagtaa

SEQ ID NO: 10002 - DNA, 1512 bp, Artificial Sequence
  Description of Artificial Sequence: Synthetic polynucleotide
atgaacatattgttgatgcaaagaatagttagttttattttggtggttagtcaagggcgttactttcatgttggagagttgaccatgacaatgttgaaaagacctcaagaagaagagtctgataataatgctacgaagaagttgaaaacgagattaacgtacccttgtatcctcgggaaggataaggtgacgggcaaattcatctttcctgcaatcactaaagatgatgttatgaatgcaagattatttttgaaggacaacgatttgaaaacttttttagaatattttttgccagtggaagtcaactctatctacatttatttcatgataaaattgttgggattcgacgtcaaagataaagaattatttatggcgttaaactctaatatcacttctaataaagaacgttctagtgcggaattatcttctatacatgcaaaagctgaagatgaggacgagttgaccgatcccttagagaaaaagcatgcagtaaaattaatcaaagatttacaaaaagccataaataaagtccttagtacaaggcttcgtttacccaacttcaatacgattgatcatttcaccgccactttgcgtaacgccaaaaaaattttggttttgacgggcgctggagtttccacttctttaggtattcccgattttagatcttctgaggggttttattctaagatcagacaccttggattggaagaccctcaggatgttttcaacttggatatattcttacaggacccttctgttttttacaatattgcccatatggttttaccaccagagaacatgtattctccgttgcacagcttcattaaaatgttacaagacaagggcaaattattaagaaactacacacagaatatagataacttagaaagttatgcagggatagatcctgataaattagtgcaatgtcacggttctttcgccactgcatcttgtgtgacttgccattggcaaatacctggtgagaaaatattcgaaaatattagaaaccttgaattaccattatgtccctactgttatcaaaaaagaaaacaatattttcctatgagtaatggcaataatacggtgcaaacaaacataaatttcaactctcccattttaaagagttatggtgttttgaaaccagacatgacattttttggcgaggccttaccaagtagatttcataagaccatccgcaaagatatattggaatgcgatttattgatttgtataggaacaagtttgaaagtggctcctgtgtctgaaattgtcaatatggtaccttctcatgttccgcagattttgatcaatagggatatggttacacatgcagagtttgacttaaaccttttgggattctgtgatgacgtggccagtctcgtagctaaaaaatgccattgggatataccgcataaaaaatggcaagatttgaagaagatagattacaactgtacggaaatagataaaggtacgtataagattaagaaacagccaagaaagaaacaacagtga

SEQ ID NO: 10003 - DNA, 534 bp, Saccharomyces cerevisiae
atgagcagcattccagctggcactgatcctgggtcctgcggtgctaatttcaagaatgaccgcaagcgcagagataagatcaacgaccgtattcaagaactattgagtatcattcccaaagacttctttagagattattacggcaattctggtagcaatgacacgttaagtgaatccactcccggtgcgcttgggttgtccagcaaggccaaaggtacagggaccaaggacggaaagcccaacaagggccaaattctcacacaggcggtagagtacatatcacatctacaaaatcaagtggacacacagaacagagaggaggtggaactgatggtgaaggccactcagttggccaagcagacaggcaccattgtcaacgatataaacttagagaacaccagcgctgaagtcgccctgtccaggattggcgtgggaccgctggccgcaacaaatgatgactcagtaagaccgccagcaaagaggttgagctccttcgagtacggagggtatggtgagtacggtaatggtagctaa

SEQ ID NO: 10004 - DNA, 534 bp, Artificial Sequence
  Description of Artificial Sequence: Synthetic polynucleotide
atgagcagcattccagctggcactgatcctgggtcctgcggtgctaatttcaagaatgaccgcaagcgcagagataagatcaacgaccgtattcaagaattattgagtatcattcccaaagacttctttagagattattacggcaattctggtagcaatgacacgttaagtgaatccactcccggtgcgcttgggttgtccagcaaggccaaaggtacagggaccaaggacggaaagcccaacaagggccaaattctcacacaggcggtagagtacatatctcatttacaaaatcaagtggacacacagaacagagaggaggtggaattgatggtgaaggccactcagttggccaagcagacaggcaccattgtcaacgatataaacttagagaacaccagcgctgaagtcgccctttccaggattggcgtgggaccgttagccgcaacaaatgatgactctgtaagaccgccagcaaagaggttgagctccttcgagtacggagggtatggtgagtacggtaatggtagctga

SEQ ID NO: 10005 - DNA, 1776 bp, Saccharomyces cerevisiae
atggaggactctaataatgaagccagcgatgacttcaacaacttattaaacaaagaaattgagtctgcaaaggaagtgaagttaagaaaattcgcgaacaggaataataataggaacgaaaacagttccaaagtcaaagatgcgagtggattcagactgagagttattcaaaccgatgggcacaaaactaaaaagacagaccctgattatgaagtgacaattgatggacccttaaggaagattgagccttattttttcacttataaaactttctgtaaggagaggtggagagatcgtaagttggtggatgtattcgtgagcgaattcagggatcgagagcccagctattattccaaaaccattgcagagggaaaagtatacttaaacgatgaacctgcaaaccttgataccatcattcgtgacggtgatctgatcacacataaagtacatcgacatgaaccgccagtcacatctaaaccaatagatattgtgtttgaagacgaagatatccttgtcattgataaacccagcagtattccagtgcacccaacgggcagatacagattcaataccattacaaaaatgctagaaagacagctaggttattcagtacatccatgtaatagactagacaagccaactagtggactaatgtttttagccaagactccattaggtgcagatagaatgggagaccaaatgaaagcgagggaagtcaccaaagaatacgtagcccgcgtgaagggcgagttccctataggtatagtagaggtagataagcctgtcagatctgttaaccctaaagttgcactaaacgctgtttgcgagatgagcgatgaaaacgctaaacatgccaagaccgttttccaaagggttagctatgatggacagacgagtattgtaaagtgtaaaccattgacaggtagaactcaccaaataagagtccatttgcagtacttgggatttcccatagcaaatgaccctatatactcgaacccagatatctggggtccagatttgggccgcggtggacttcaaaactatgatgacatcgttctgaaactagacgctattggcaagactaatcctgcagagagctggattcatcctcatagcgagggtgaatacttgcttggccgtcagtgcgaagaatgcgaggctgaaatgtacacagatcccggtactaatgatctcgacctctggctgcatgccttccggtacgagtcattggaaagaaattcggatacgcaaaaacctctctggagttatagaacaaaataccctgaatgggccttagagccacatcgccgatatatggaaatggccgttaaggaagctggtaagtgtggcccgacaaagactgcttttagtgttggtgccgttcttgttcatggaactcaagtacttgccacaggatattcaagagagctaccaggaaacactcatgcagaacagtgtgctttgataaagtactcgcagttacacccgaactgtcccactatagtccctatgggaacagtgctctatacaaccatggaaccctgttccttcaggctaagtggcaatgagccttgctgcgatagaatcctggccacccaaggtgccattggtactgtcttcgtgggggttatggagcccgatacatttgttaaaaacaatacaagtttgaacaagctggaatcgcacggtgtgaactacatacaaataccaggctacgaggaggagtgcaccatcattgccttcaaaggccacgataatagtgacgacaaagcttag

SEQ ID NO: 10006 - DNA, 1776 bp, Artificial Sequence
  Description of Artificial Sequence: Synthetic polynucleotide
atggaggactctaataatgaagccagcgatgacttcaacaacttattaaacaaagaaattgagtctgcaaaggaagtgaagttaagaaaattcgcgaacaggaataataataggaacgaaaacagttccaaagtcaaagatgcgagtggattcagattgagagttattcaaaccgatgggcacaaaactaaaaagacagaccctgattatgaagtgacaattgatggacccttaaggaagattgagccttattttttcacttataaaactttctgtaaggagaggtggagagatcgtaagttggtggatgtattcgtgagcgaattcagggatagagagcccagctattattccaaaaccattgcagagggaaaagtatacttaaacgatgaacctgcaaaccttgataccatcattcgtgacggtgatttgatcacacataaagtacatcgtcatgaaccgccagtcacatctaaaccaatagatattgtgtttgaagacgaagatatccttgtcattgataaacccagcagtattccagtgcacccaacgggcagatacagattcaataccattacaaaaatgttggaaagacagttgggttattctgtacatccatgtaatagattagacaagccaactagtggattaatgtttttagccaagactccattaggtgcagatagaatgggagaccaaatgaaagcgagggaagtcaccaaagaatacgtagcccgcgtgaagggcgagttccctataggtatagtagaggtagataagcctgtcagatctgttaaccctaaagttgcattgaacgctgtttgcgagatgagcgatgaaaacgctaaacatgccaagaccgttttccaaagggttagctatgatggacagacgagtattgtaaagtgtaaaccattgacaggtagaactcaccaaataagagtccatttgcagtacttgggatttcccatagcaaatgaccctatatactctaacccagatatctggggtccagatttgggccgcggtggacttcaaaactatgatgacatcgttttgaaattagacgctattggcaagactaatcctgcagagagctggattcatcctcatagcgagggtgaatacttgcttggccgtcagtgcgaagaatgcgaggctgaaatgtacacagatcccggtactaatgatctcgacctctggttacatgccttcaggtacgagtctttggaaagaaattctgatacgcaaaaacctctctggagttatagaacaaaataccctgaatgggccttagagccacatcgcagatatatggaaatggccgttaaggaagctggtaagtgtggcccgacaaagactgcttttagtgttggtgccgttcttgttcatggaactcaagtacttgccacaggatattctagagagttaccaggaaacactcatgcagaacagtgtgctttgataaagtactctcagttacacccgaactgtcccactatagtccctatgggaacagtgctctatacaaccatggaaccctgttccttcaggttgagtggcaatgagccttgctgcgatagaatcttggccacccaaggtgccattggtactgtcttcgtgggggttatggagcccgatacatttgttaaaaacaatacaagtttgaacaagttggaatctcacggtgtgaactacatacaaataccaggctacgaggaggagtgcaccatcattgccttcaaaggccacgataatagtgacgacaaagcttga

SEQ ID NO: 10007 - DNA, 1155 bp, Saccharomyces cerevisiae
atgaacaaaacgaattggaaggtatctgtaactacattcaattgtggtaaggaatttcccgttgaaaattcgaaagcaatcgttaagcaattgcttttcccctacgatgacggcatctcccaattggaattgcaagatctatatgtgttggggttccaagaagtagtccccatatggcaaggctccttccctgctgttaatcgtgatttaatcgatagaattacaactactgcggttaattgtctgaatgaaaaagtgtcagctacacaaggggatgagcagtattcatgtttaggggtgaatagtcttggggcgattaccataatagtattatacaataataatgcgctaaaggtaaaagatgatattttgaaacggaatgggaaatgcggttggtttggtacacacttgaaaggtggaactttgataagttttcagatgacacgcaatggcgaggagaactgggaaagatttagctatatttgtgctcatttaaatgcaaatgaaggtgtcaacaatagaaatcaaagaatagatgattacaaacgaataatgagtgaagtgtgtgattctgaggttgcaaaaagcgaccactttttctttctaggcgatttgaattttagggttactagtacttatgatccaactaccaattattcgtccaccacaacgttaaggcgtctattagaaaatcatgaagaactaaatctgctacgtaaaggagaggatgaaccgttatgcaaaggttttcaggagctgaagataacatttccaccgacatacaaattcaagttgtttgaaaaggaaacatataatacaaaaagaatcccgtcgtggtgcgataggattctctacaaaagctatgcagtgccaactttcgcacaagaaggtacttaccattccgtccctaggtccaatgctctattatttagcgatcatcaacccgttaatcttaccgtaagattaccaaggtctacagggacgccagtgccgttatccttacatatcgaaaagtatcctttatcatggagctctggcctgattggacaaattggtgacgcagtcatcgggtactgcggttggctagttactaagaatgtacattattggatattaggttctttactattatatttactattaaaaatcctgtaa

SEQ ID NO: 10008 - DNA, 1155 bp, Artificial Sequence
  Description of Artificial Sequence: Synthetic polynucleotide
atgaacaaaacgaattggaaggtatctgtaactacattcaattgtggtaaggaatttcccgttgaaaattctaaagcaatcgttaagcaattgcttttcccctacgatgacggcatctcccaattggaattgcaagatttatatgtgttggggttccaagaagtagtccccatatggcaaggctccttccctgctgttaatcgtgatttaatcgatagaattacaactactgcggttaattgtttgaatgaaaaagtgtctgctacacaaggggatgagcagtattcttgtttaggggtgaatagtcttggggcgattaccataatagtattatacaataataatgcgttaaaggtaaaagatgatattttgaaaagaaatgggaaatgcggttggtttggtacacacttgaaaggtggaactttgataagttttcagatgacacgcaatggcgaggagaactgggaaagatttagctatatttgtgctcatttaaatgcaaatgaaggtgtcaacaatagaaatcaaagaatagatgattacaaaagaataatgagtgaagtgtgtgattctgaggttgcaaaaagcgaccactttttctttttgggcgatttgaattttagggttactagtacttatgatccaactaccaattattcttccaccacaacgttaaggcgtttattagaaaatcatgaagaattgaatttattacgtaaaggagaggatgaaccgttatgcaaaggttttcaggagttgaagataacatttccaccgacatacaaattcaagttgtttgaaaaggaaacatataatacaaaaagaatcccgagctggtgcgataggattctctacaaaagctatgcagtgccaactttcgcacaagaaggtacttaccattccgtccctaggtccaatgctttattatttagcgatcatcaacccgttaatcttaccgtaagattaccaaggtctacagggacgccagtgccgttatccttacatatcgaaaagtatcctttatcttggagctctggcttaattggacaaattggtgacgcagtcatcgggtactgcggttggttagttactaagaatgtacattattggatattaggttctttattattatatttattattaaaaatcttgtga

SEQ ID NO: 10009 - DNA, 1074 bp, Saccharomyces cerevisiae
atggcattggaaagagaattattggttgcaactcaagctgtacgaaaggcgtctttattgactaagagaattcaatctgaagtgatttctcacaaggactccactactattaccaagaatgataattctccagtaaccacaggtgattatgctgcacaaacgatcatcataaatgctatcaagagcaattttcctgatgataaggtagttggtgaagaatcctcatcaggattgagcgacgcattcgtctcaggaattttaaacgaaataaaagccaatgacgaagtttataacaagaattataaaaaggatgattttctgtttacaaacgatcagtttccgctaaaatctttggaggacgtcaggcaaatcatcgatttcggcaattacgaaggtggtagaaaaggaagattttggtgtttggatcctattgacggaaccaaggggtttttaagaggtgaacagtttgcagtatgtctggccttaattgtggacggtgttgttcagcttggttgtattggatgccccaacttagttttaagttcttatggggcccaagatttgaaaggccatgagtcatttggttatatctttcgtgctgttagaggtttaggtgccttctattctccatcttcagatgcagagtcatggaccaaaatccacgttagacacttaaaagacactaaagacatgattactttagagggagttgaaaagggacactcctctcatgatgaacaaactgctatcaaaaacaaactaaatatatccaaatctttgcacttggattctcaagccaagtactgtttgttagcattgggcttagcagacgtatatttacgtctgcctatcaaactttcttaccaagaaaagatctgggaccatgctgcaggcaacgttattgtccatgaagctggaggtatccatacagatgccatggaagatgttcctctagacttcggtaacggtagaacgctagctacgaagggagttatagcgtcaagtggcccacgcgagttacatgacttggtggtgtctacatcatgcgatgtcattcagtcaagaaacgcctaa

SEQ ID NO: 10010 - DNA, 1074 bp, Artificial Sequence
  Description of Artificial Sequence: Synthetic polynucleotide
atggcattggaaagagaattattggttgcaactcaagctgtaagaaaggcgtctttattgactaagagaattcaatctgaagtgatttctcacaaggactccactactattaccaagaatgataattctccagtaaccacaggtgattatgctgcacaaacgatcatcataaatgctatcaagagcaattttcctgatgataaggtagttggtgaagaatcctcttctggattgagcgacgcattcgtcagtggaattttaaacgaaataaaagccaatgacgaagtttataacaagaattataaaaaggatgattttttgtttacaaacgatcagtttccgttaaaatctttggaggacgtcaggcaaatcatcgatttcggcaattacgaaggtggtagaaaaggaagattttggtgtttggatcctattgacggaaccaaggggtttttaagaggtgaacagtttgcagtatgtttggccttaattgtggacggtgttgttcagcttggttgtattggatgccccaacttagttttaagttcttatggggcccaagatttgaaaggccatgagtcttttggttatatctttcgtgctgttagaggtttaggtgccttctattctccatcttctgatgcagagagttggaccaaaatccacgttagacacttaaaagacactaaagacatgattactttagagggagttgaaaagggacactcctctcatgatgaacaaactgctatcaaaaacaaattgaatatatccaaatctttgcacttggattctcaagccaagtactgtttgttagcattgggcttagcagacgtatatttacgtttacctatcaaactttcttaccaagaaaagatctgggaccatgctgcaggcaacgttattgtccatgaagctggaggtatccatacagatgccatggaagatgttcctttggacttcggtaacggtagaacgttggctacgaagggagttatagcgtccagtggcccacgcgagttacatgacttggtggtgtctacatcctgcgatgtcattcagtctagaaacgcctga

SEQ ID NO: 10011 - DNA, 2874 bp, Saccharomyces cerevisiae
atgccccctcagattcccaatgaaaatgatgatctctttacaaggtggcttaagtctcgggccatcatacaaagggcagtatcgacaagagagtgctttgactcagaagtatttctggcgtctggtggctggaatataacgaatgagataataacgttaaagaaatattatcaactcaagtggccaaactccagttgcaattcgtttcatccaaaaaccgtggagtttattaaagaacgattacacaacctagaagaacatgactcttcatggaaaatcccaaatcctgcttactcattcaagaaagccttcttggaggatactaaatctgcattttccaacttagaacccgtctggggaccatcaaggcttttgaatccagctgaattactattgccacaggacgaaaaactacttgttcaagagataccactagagttcgcaccttttcaatacacaaataggtttgcttatggtggtttgcagttcaagaacaatttgttcgtcacttatgggagttattccttcctggctgccggtcaatgcgtcgaagttcataatttcgatatactattgaacgtttcgtcattagaaatatgtcacgccttattgcccgtgataataccagatgacggagatgtaagaaacttccgcaattcatcatatgtgaaatttaaggatacacagttcaacagcatacctgaactatgttctatcaactttatgaagatttgtaacttcatgcatcaagattttctactagcttgcggtgacaacggaatcgtttatatctgggaaatcaacaaagttattaagatatttaataaatttacttcggatatcttgggaggcaaagataacagccgggaaagatacataaatgttgatccatatatggtgttaagagtagaggaatcttgttggagtgttgatgtaatagatataaatggcatcatatatatcgctgttggccataacaagcctggagttacagtctttgcattcgataaagatgtaaagaaggaaagacggtacattcggcctctagatcttccctcatctcacaatgttccttgtgttaactttgttcctaattcaaaagattctgttggatatattacattaagttattgttctatatttgggaatgttgttaccgttaaattaaaggagcatgattgtaccattttaacgagtttccttgatactcaattttttggcgacgacttatggacaataactccactgactaagaaggattttgcgaaagttgacaatttcgaattgttgaatcttaactaccaagacggtttcaaagaaagcatgttatattctatttgccgagatgattttttacttgggtattactgtgataacgcctacctctctgggaatttcggtattggtacattactcaatcaatttcaggttcctgtcacagacctacgactgacttcttcagcagggatccccgatgaagttataccattaagatttacctcatttgatagaaattacactacaacgggctcgataaaatacgagtacagcagagaggattttgcacttattttacatgccggtgacttagacgatatgaatgatgcagtgacaaaaaacacctcatgtgaacagcatttacaccaatggacattttgggaggattctggttataaacattatcgtgctactgagcgtggattttcgaaatacaaggatattattaatacttttccacagttgataactcctagtggaagaaataaaacatcgcaatatcaaaacacttctgggagaaagatctgtgagccgtctacttataaacttactgatctcgaaaatgatattgaagatatatctcgcgaatttaatagaagtattcgtaatttgaaaatggataaacaaagacaactacgaacttcaaaagagttcaaatcgctaagttcagtaaatcatataccaaatattgaatcgggaaactttttatggtacaacaccgatgccgctgccgattggagaacactttttggcaaggatttgaacacggtcttgaaggacccagaaatttgtagccttcaactgaactctacagaagaggacgatgtcaatagcgaccctgaaaatgaagaatctggtagcagcttaacaagtttccagcgaagatatagggatactgaacagcgtgctcacttgaaatcagaatcgcagaaatcttgggggttccacaactatgtaagaaacgtcaagcggttattagagtcagcagtaccgggctcagaagattcgcctcttgggtatcaactatccgaaatgcacgacgagttcttcttcctaaccacagcccataggctggtgttgatgaaagcaaatccactcataattatatcagcaactcatcatgagatttttcccttagatggtgttgtgacgtgtgcttccaagtcgctgctccaagcactaaacagaataaattttgtgtgtcacatcaaagaactaaattgcatagccgtggcttcacaattgggtctcatttcattactaagactaacagagtacagaggcatctattcgtttagacaagagtatattcttggatgggaagtccaagaccctgttaaccctagtccagagtgcagatgtaacaggaacttgtttgacgcaccaatgtatggtgcagatggagagagctcggacacatactgcggcgtgtgcgacgtctatttccccatgggtgatatttgcggactagattacacttatgcatctgacagtgaagagttaaaacgtaagggatatgctaccttatacgtagcatcaagaggctccttgagggcattcaagatcacaactgagcatggaacaactcaacaatag

SEQ ID NO: 10012 - DNA, 2874 bp, Artificial Sequence
  Description of Artificial Sequence: Synthetic polynucleotide
atgccccctcagattcccaatgaaaatgatgatctctttacaaggtggcttaagtctcgtgccatcatacaaagggcagtatctacaagagagtgctttgactctgaagtatttttggcgtctggtggctggaatataacgaatgagataataacgttaaagaaatattatcaactcaagtggccaaactccagttgcaattcttttcatccaaaaaccgtggagtttattaaagaaagattacacaacttggaagaacatgactcttcttggaaaatcccaaatcctgcttactctttcaagaaagccttcttggaggatactaaatctgcattttccaacttagaacccgtctggggaccatctaggcttttgaatccagctgaattattattgccacaggacgaaaaattacttgttcaagagataccattggagttcgcaccttttcaatacacaaataggtttgcttatggtggtttgcagttcaagaacaatttgttcgtcacttatgggagttattccttcttggctgccggtcaatgcgtcgaagttcataatttcgatatattattgaacgtttcttctttagaaatatgtcacgccttattgcccgtgataataccagatgacggagatgtaagaaacttccgcaattcttcttatgtgaaatttaaggatacacagttcaacagcatacctgaattatgttctatcaactttatgaagatttgtaacttcatgcatcaagattttttattagcttgcggtgacaacggaatcgtttatatctgggaaatcaacaaagttattaagatatttaataaatttacttctgatatcttgggaggcaaagataacagcagagaaagatacataaatgttgatccatatatggtgttaagagtagaggaatcttgttggagtgttgatgtaatagatataaatggcatcatatatatcgctgttggccataacaagcctggagttacagtctttgcattcgataaagatgtaaagaaggaaagaagatacattagacctttggatcttccctcttctcacaatgttccttgtgttaactttgttcctaattctaaagattctgttggatatattacattaagttattgttctatatttgggaatgttgttaccgttaaattaaaggagcatgattgtaccattttaacgagtttccttgatactcaattttttggcgacgacttatggacaataactccattgactaagaaggattttgcgaaagttgacaatttcgaattgttgaatcttaactaccaagacggtttcaaagaaagcatgttatattctatttgcagagatgattttttacttgggtattactgtgataacgcctacctctctgggaatttcggtattggtacattactcaatcaatttcaggttcctgtcacagaccttagattaacttcttctgcagggatccccgatgaagttataccattaagatttacctcttttgatagaaattacactacaacgggctctataaaatacgagtacagcagagaggattttgcacttattttacatgccggtgacttagacgatatgaatgatgcagtgacaaaaaacacctcttgtgaacagcatttacaccaatggacattttgggaggattctggttataaacattatcgtgctactgagcgtggattttccaaatacaaggatattattaatacttttccacagttgataactcctagtggaagaaataaaacatctcaatatcaaaacacttctgggagaaagatctgtgagccgtctacttataaacttactgatctcgaaaatgatattgaagatatatctcgcgaatttaatagaagtattcgtaatttgaaaatggataaacaaagacaattaagaacttctaaagagttcaaatctttgagttctgtaaatcatataccaaatattgaatctggaaactttttatggtacaacaccgatgccgctgccgattggagaacactttttggcaaggatttgaacacggtcttgaaggacccagaaatttgtagccttcaattgaactctacagaagaggacgatgtcaatagcgaccctgaaaatgaagaatctggtagcagcttaacaagtttccagagaagatatagggatactgaacagcgtgctcacttgaaaagtgaatctcagaaatcttgggggttccacaactatgtaagaaacgtcaagagattattagagtctgcagtaccgggctctgaagattctcctcttgggtatcaattatccgaaatgcacgacgagttcttcttcttgaccacagcccataggttggtgttgatgaaagcaaatccactcataattatatctgcaactcatcatgagatttttcccttagatggtgttgtgacgtgtgcttccaagtctttactccaagcattgaacagaataaattttgtgtgtcacatcaaagaattgaattgcatagccgtggcttctcaattgggtctcatttctttattaagattgacagagtacagaggcatctattcttttagacaagagtatattcttggatgggaagtccaagaccctgttaaccctagtccagagtgcagatgtaacaggaacttgtttgacgcaccaatgtatggtgcagatggagagagcagtgacacatactgcggcgtgtgcgacgtctatttccccatgggtgatatttgcggattagattacacttatgcatctgacagtgaagagttaaaacgtaagggatatgctaccttatacgtagcatctagaggctccttgagggcattcaagatcacaactgagcatggaacaactcaacaatga

SEQ ID NO: 10013 - DNA, 1476 bp, Saccharomyces cerevisiae
atgattagtggtgtgctggtatactcatcgagaggtgaacttgtcttgaacaagttcttcaagaactcgttgaagcggtccatatccgatatcttccgagtacaagtgatcaataatctagatgttagatcgcctgttttgacactgggctcaactactttccatcacatcaggtcgaggcatggtgacaatttgtggttggtaaccattacgagaagcaacgctaatagtgcggcgatctgggagttcttatataagcttgatgcagtgatgaatgcttatcgattggatagagaggaggccttgaaagaggaattcatgattgtgcatgagatgctggatataatgttgggtggaaatgggataccaattgacactgaattgaactctgttatagcgcagatgtctgtgaaacccgttagaaatatgggcggattgttagatagtcccgatggaaatgatgtattatcttcctcttcatctcctacttcttcagcaggagaactacattttcccaaatttttgacaaaaagaagcagtagtttcctgggtcaaggagactccacttctgatttctatgataacaataagatcacttggaggcccaaggggataatacacaagaaggatgaagttttcttgtatgtcaatgagaggataaacattctggtatctagggatggttctatcttgaaatcatacgttgatggcaccatagatatcaccacacacttgagtgggacccctatttgtagatttggattgaatgattctttgggaatgcagtccgaagacgagaagaaatggttagcacagcagcagcgtcactctggcagcgattttggaaacaagaacttcattcccaaagctgctgccggtagtgttttgttggaagattgcaagtttcacgaatgtgtctcacttgacaaatttaacagaaatcatatcattgaattcgtcccaccagacggttcgatggagttgatgaaatatcatgtacgagataacataaacctgccgttcaaggttacacctattgttacacattctacaagagataacgagattgattacaggataacattgaagtctttatttcctggaaaactttccgccaaagatgtggtactacatatacccgttccaccaagcactgtggattgtaagataagtgtctctaatggccactgtaagtttgtgccagaagaaaatgcaatgatttggaggttcaacaagtacaatgggttgacggaaaacactttaagtgcagttactgtgtccacaagtgatactactcaattgaatcttcaacaatggacaagacctccaatatccctggaattcgaggtcatgatgttcagtaattctggcttagtcgtacgatactttaccatttctggaaaagacagtaagcatcgtgctgtaaaatggattaaatatatatcgaaagccggttcttacgaggtgaggtactag

SEQ ID NO: 10014 - DNA, 1476 bp, Artificial Sequence
  Description of Artificial Sequence: Synthetic polynucleotide
atgattagtggtgtgttagtatactcttctagaggtgaacttgtcttgaacaagttcttcaagaactctttgaagaggtccatatccgatatcttcagagtacaagtgatcaataatttggatgttagatctcctgttttgacattaggctccactactttccatcacatcaggagtaggcatggtgacaatttgtggttggtaaccattacgagaagcaacgctaatagtgcggcgatctgggagttcttatataagcttgatgcagtgatgaatgcttatagattggatagagaggaggccttgaaagaggaattcatgattgtgcatgagatgcttgatataatgttgggtggaaatgggataccaattgacactgaattgaactctgttatagcgcagatgtctgtgaaacccgttagaaatatgggcggattgttagatagtcccgatggaaatgatgtattatcttcctcttcttctcctacttcttctgcaggagaattacattttcccaaatttttgacaaaaagaagcagtagtttcttgggtcaaggagactccacttctgatttctatgataacaataagatcacttggaggcccaaggggataatacacaagaaggatgaagttttcttgtatgtcaatgagaggataaacattttagtatctagggatggttctatcttgaaatcttacgttgatggcaccatagatatcaccacacacttgagtgggacccctatttgtagatttggattgaatgattctttgggaatgcagtccgaagacgagaagaaatggttagcacagcagcagcgtcactctggcagcgattttggaaacaagaacttcattcccaaagctgctgccggtagtgttttgttggaagattgcaagtttcacgaatgtgtctcccttgacaaatttaacagaaatcatatcattgaattcgtcccaccagacggttctatggagttgatgaaatatcatgtaagagataacataaacttaccgttcaaggttacacctattgttacacattctacaagagataacgagattgattacaggataacattgaagtctttatttcctggaaaactttccgccaaagatgtggtattacatatacccgttccaccaagcactgtggattgtaagataagtgtctctaatggccactgtaagtttgtgccagaagaaaatgcaatgatttggaggttcaacaagtacaatgggttgacggaaaacactttaagtgcagttactgtgtccacaagtgatactactcaattgaatcttcaacaatggacaagacctccaatatccttagaattcgaggtcatgatgttcagtaattctggcttagtcgtacgttactttaccatttctggaaaagacagtaagcatcgtgctgtaaaatggattaaatatatatccaaagccggttcttacgaggtgaggtactga

SEQ ID NO: 10015 - DNA, 1491 bp, Saccharomyces cerevisiae
atgtcaatgagtaatattgttgtttttggaggggactcgcaccccgagttagttactaagatctgtgaaaatttggacattcacccatcgaaagtagaattagggaagttttctaatggggaaacgaacattgctcttcgcgaatctgttcgtgaaaaggatgtatatatcatccagagtggttgtggccaggtgaacgacacgttcatgcagttgctgattttaatcagtgcctgcaagtccgcttctgcctcgagggttacagccgtaatgccatatctctgctactcgagacagccagatattccatatactgccaagggtgctcccataatttccaagcctaaagaaaactatacttttgaatcgcatccaggcacacccgtgtcatcttctttaatgacgcaaagaccaggtgctgagagctcgttgaagagtttggatagtgcaatacgatcaactatcaacttagaaaatcctcaacctatcagaacaccaaacagcagtgctacggcgaataacaatttcgacatcaagaagacgctttctttttcaagaattcctatgattcccggtggtaagttacaaaatacaagcaatagcacggacgctggtgaattgttcaacgctcaaaatgcaggctataagctatgggtagtacaagccggtactttgattgctcatttgttgagtgctgcaggtgctgaccatgtgatcacaatggatttgcacgatccacagttccctgggttttttgacattccagtggataatctctactgtaaacccattgcacaaaactacatccagcatcgcattccagattatcaggatgctgtgatcgtttctccagatgctggtggtgcaaagagagctacggctattgcagacgccttggaattgtccttcgccctaattcataaagaaagaagatctcagttattgaagggccctccagatgcgacgttaacctctggtggttcgttaccagtatctccaaggccattagttactactttggtttcctcccaaaatactacttcttcaggtgccactggggttgcggcccttgaaatgaagaaaacaacttcaacatcttccacctcgtcgcaatcttctaattcgtccaagttcgttcaaactaccatgcttgttggcgatgttagaaacaaggtgtgtattatagtcgacgacttggtggatacttcatacactattacaagagctgcgaaattgttgaaggatcaaggatctaccaaagtttatgccttaataacgcacggtgttttttccggtgatgcgctagaaagaatcggccaaagtagtatagataagttgatcatttctaacacggttcctcaagatagaacactacagtacctaggtaaggacagagtggatgttattgatgtctcctgcataatcggtgaagcaattagaagaatccataacggtgaatccatttctatgttgttcgagcatggatggtag

SEQ ID NO: 10016 - DNA, 1491 bp, Artificial Sequence
  Description of Artificial Sequence: Synthetic polynucleotide
atgtccatgagtaatattgttgtttttggaggggactctcaccccgagttagttactaagatctgtgaaaatttggacattcacccatctaaagtagaattagggaagttttctaatggggaaacgaacattgctcttcgcgaatctgttcgtgaaaaggatgtatatatcatccagagtggttgtggccaggtgaacgacacgttcatgcagttgttaattttaatcagtgcctgcaagtccgcttctgcctctagggttacagccgtaatgccatatctctgctactctagacagccagatattccatatactgccaagggtgctcccataatttccaagcctaaagaaaactatacttttgaaagtcatccaggcacacccgtgtcttcttctttaatgacgcaaagaccaggtgctgagagctctttgaagagtttggatagtgcaataagatctactatcaacttagaaaatcctcaacctatcagaacaccaaacagcagtgctacggcgaataacaatttcgacatcaagaagacgctttctttttccagaattcctatgattcccggtggtaagttacaaaatacaagcaatagcacggacgctggtgaattgttcaacgctcaaaatgcaggctataagttatgggtagtacaagccggtactttgattgctcatttgttgagtgctgcaggtgctgaccatgtgatcacaatggatttgcacgatccacagttccctgggttttttgacattccagtggataatctctactgtaaacccattgcacaaaactacatccagcatcgcattccagattatcaggatgctgtgatcgtttctccagatgctggtggtgcaaagagagctacggctattgcagacgccttggaattgtccttcgccttaattcataaagaaagaagatctcagttattgaagggccctccagatgcgacgttaacctctggtggttctttaccagtatctccaaggccattagttactactttggtttcctcccaaaatactacttcttctggtgccactggggttgcggcccttgaaatgaagaaaacaacttctacatcttccacctcttctcaatcttctaattcttccaagttcgttcaaactaccatgcttgttggcgatgttagaaacaaggtgtgtattatagtcgacgacttggtggatacttcttacactattacaagagctgcgaaattgttgaaggatcaaggatctaccaaagtttatgccttaataacgcacggtgttttttccggtgatgcgttagaaagaatcggccaaagtagtatagataagttgatcatttctaacacggttcctcaagatagaacattacagtacttgggtaaggacagagtggatgttattgatgtctcctgcataatcggtgaagcaattagaagaatccataacggtgaatccatttctatgttgttcgagcatggatggtga

SEQ ID NO: 10017 - DNA, 2121 bp, Saccharomyces cerevisiae
atgtcgtttttgccactaaggtctaggtcacgatcaggcgctcctcattgggtatacatcatcttatatcacatctttacgataccgaagatatattcactgccgttgttatccggatcacacgtactcaattctagggatgttgccgattccggccatagcgtaggtgatgaggcaagcgttaccacgtactatattatctctatcatcctagtgctgctgggtggtgtatttgcaggattgacgctggggttgatgggtcaagatgaagtctacctgaaggtaatcagcacttcaggctcgaattctgaaaagaaactggccaagcgggtgcttgacctaatatctagggggaagcattgggttctagtcacactgctgctttctaatgttataaccaacgaaacattgcctattgttttggacaggtgtcttgggggtggttggcaggctgtagtgtcgtcaactattctaattgtgatcttcggtgaaattattccgcagagtgtctgtgttaaatacgggctgcaagttggggcattcttctgcccctttgttcttgtactgatgtatctgatgtacccagtcgcatatccgatcgcgactctcctggactatatgctgggtgaagatcatggtacgatgtacaaaaaatccggcttaaagactttggtcaccttgcataggaccatgggggtggaacggttgactaaagacgaagttacaatcatctctgctgttttggatctaaaggcaaagagggttgaggaaatcatgactccgattgaaaacgtgttcacaatgagtgccgataccatcctagacgataaaactgtcgaaaaaatcttcaactcagggttttctagaatcccgatttttttgcccaatgaaccaaacaacttcatcggcatgttacttgtcagggtgcttatctcctacgatcctgatgactgcctcccaatctcccacttccccctagccacgttgccagaaacttccccgaacacatcttgtttgaatattctgaattacttccaggaggggaaagctcacatgtgcgtcgttagtaaagagccgggctcctcgcatggcgctattggtgttttaactttggaggatgtcattgaagaattgatcggtgaagaaatcgtggacgagtctgatgtctttgtggacatgcatcagcatattatgagacaacaaccggggcccttgagcaaaaggcacattacttcctatttgcatcatttgtacactagctctcacaaggagcacaaagctgctgaccaagctgatgaatcgtctccactcttgtctccatccaattctaatcacccatccgagcacccacagcaagatttgaataataagtcttggaagcagaagtcaaatgatggttacgacaggtccaacgctgtattgtctccaactccacaagtgacggaacatggcaccatcataccttcaaatctagcgtccaacccgttgaacgtaaataaatcttttgttaccattaaaaagcctgccaatgttccgaaaatcattactacacacactcctcattctagcaaagagccttctccagcaccacactcaaatgataaatcactctccgccgaagaacaacaactattaagtgatcatgcagagctatctcgccaagctgttctccatactcaacggtcgggtcaaccaactcaagttactacctcgactaaaaccacgagaaatagccctgatagtatatcaattccaaattctggcgcgaatcacggcaacgaaaatcaaaacgttacaatctcaacctcttaccaaaatacgaagaatggtattgtggaatctgtcatcacagtcaaaggtgttccaaaaaccatcattggccccgcaaaagattgggacgaatccaaaagtgaatatggaaacgagaatatcaatcaagagaattctaatcgaagtgacgatagagaaagttcaagttcaaatgcaagtttattttccagtattaagaataaatttaagaacgaaaacgctaacaacaatgatcgttctaatttcaccgactctttgtcaagaacttccaattatgatgccaacggctcctcgtcgaccataaaaagatga

SEQ ID NO: 10018 - DNA, 2121 bp, Artificial Sequence
  Description of Artificial Sequence: Synthetic polynucleotide
atgagttttttgccattaaggtctaggtctagaagcggcgctcctcattgggtatacatcatcttatatcacatctttacgataccgaagatatattctttaccgttgttatccggatctcacgtactcaattctagggatgttgccgattccggccatagcgtaggtgatgaggcaagcgttaccacgtactatattatctctatcatcttagtgttgttgggtggtgtatttgcaggattgacgttggggttgatgggtcaagatgaagtctacttgaaggtaatcagcacttctggcagtaattctgaaaagaaattggccaagagggtgcttgacttgatatctagggggaagcattgggttttggtcacattattactttctaatgttataaccaacgaaacattgcctattgttttggacaggtgtcttgggggtggttggcaggctgtagtgtcttctactattttaattgtgatcttcggtgaaattattccgcagagtgtctgtgttaaatacgggttgcaagttggggcattcttctgcccctttgttcttgtattaatgtatttaatgtacccagtcgcatatccgatcgcgactctcttggactatatgttgggtgaagatcatggtacgatgtacaaaaaatccggcttaaagactttggtcaccttgcataggaccatgggggtggaaagattgactaaagacgaagttacaatcatctctgctgttttggatttgaaggcaaagagggttgaggaaatcatgactccgattgaaaacgtgttcacaatgagtgccgataccatcttggacgataaaactgtcgaaaaaatcttcaactctgggttttctagaatcccgatttttttgcccaatgaaccaaacaacttcatcggcatgttacttgtcagggtgcttatctcctacgatcctgatgactgcctcccaatctcccacttccccttagccacgttgccagaaacttccccgaacacatcttgtttgaatattttgaattacttccaggaggggaaagctcacatgtgcgtcgttagtaaagagccgggctcctctcatggcgctattggtgttttaactttggaggatgtcattgaagaattgatcggtgaagaaatcgtggacgagtctgatgtctttgtggacatgcatcagcatattatgagacaacaaccggggcccttgagcaaaaggcacattacttcctatttgcatcatttgtacactagctctcacaaggagcacaaagctgctgaccaagctgatgaaagctctccactcttgtctccatccaattctaatcacccatccgagcacccacagcaagatttgaataataagtcttggaagcagaagagcaatgatggttacgacaggtccaacgctgtattgtctccaactccacaagtgacggaacatggcaccatcataccttccaatttggcgtccaacccgttgaacgtaaataaatcttttgttaccattaaaaagcctgccaatgttccgaaaatcattactacacacactcctcattctagcaaagagccttctccagcaccacactctaatgataaatctctctccgccgaagaacaacaattattaagtgatcatgcagagctttctcgccaagctgttctccatactcaaagatctggtcaaccaactcaagttactacctctactaaaaccacgagaaatagccctgatagtatatctattccaaattctggcgcgaatcacggcaacgaaaatcaaaacgttacaatctccacctcttaccaaaatacgaagaatggtattgtggaatctgtcatcacagtcaaaggtgttccaaaaaccatcattggccccgcaaaagattgggacgaatccaaaagtgaatatggaaacgagaatatcaatcaagagaattctaatagaagtgacgatagagaaagtagtagtagtaatgcaagtttattttccagtattaagaataaatttaagaacgaaaacgctaacaacaatgatcgttctaatttcaccgactctttgtccagaacttccaattatgatgccaacggctcctcttccaccataaaaagatga

SEQ ID NO: 10019 - DNA, 1323 bp, Saccharomyces cerevisiae
atgcttgctgtcagaagattaacaagatacacattccttaagcgaacgcatccggtgttatatactcgtcgtgcatataaaattttgccttcaagatctactttcctaagaagatcattattacaaacacaactgcactcaaagatgactgctcatactaatatcaaacagcacaaacactgtcatgaggaccatcctatcagaagatcggactctgccgtgtcaattgtacatttgaaacgtgcgcccttcaaggttacagtgattggttctggtaactgggggaccaccatcgccaaagtcattgcggaaaacacagaattgcattcccatatcttcgagccagaggtgagaatgtgggtttttgatgaaaagatcggcgacgaaaatctgacggatatcataaatacaagacaccagaacgttaaatatctacccaatattgacctgccccataatctagtggccgatcctgatcttttacactccatcaagggtgctgacatccttgttttcaacatccctcatcaatttttaccaaacatagtcaaacaattgcaaggccacgtggcccctcatgtaagggccatctcgtgtctaaaagggttcgagttgggctccaagggtgtgcaattgctatcctcctatgttactgatgagttaggaatccaatgtggcgcactatctggtgcaaacttggcaccggaagtggccaaggagcattggtccgaaaccaccgtggcttaccaactaccaaaggattatcaaggtgatggcaaggatgtagatcataagattttgaaattgctgttccacagaccttacttccacgtcaatgtcatcgatgatgttgctggtatatccattgccggtgccttgaagaacgtcgtggcacttgcatgtggtttcgtagaaggtatgggatggggtaacaatgcctccgcagccattcaaaggctgggtttaggtgaaattatcaagttcggtagaatgtttttcccagaatccaaagtcgagacctactatcaagaatccgctggtgttgcagatctgatcaccacctgctcaggcggtagaaacgtcaaggttgccacatacatggccaagaccggtaagtcagccttggaagcagaaaaggaattgcttaacggtcaatccgcccaagggataatcacatgcagagaagttcacgagtggctacaaacatgtgagttgacccaagaattcccattattcgaggcagtctaccagatagtctacaacaacgtccgcatggaagacctaccggagatgattgaagagctagacatcgatgacgaatag

SEQ ID NO: 10020 - DNA, 1323 bp, Artificial Sequence
  Description of Artificial Sequence: Synthetic polynucleotide
atgcttgctgtcagaagattaacaagatacacattccttaagagaacgcatccggtgttatatactcgtcgtgcatataaaattttgccttccagatctactttcttaagaagatctttattacaaacacaattacactccaagatgactgctcatactaatatcaaacagcacaaacactgtcatgaggaccatcctatcagaagaagtgactctgccgtgtccattgtacatttgaaacgtgcgcccttcaaggttacagtgattggttctggtaactgggggaccaccatcgccaaagtcattgcggaaaacacagaattgcattcccatatcttcgagccagaggtgagaatgtgggtttttgatgaaaagatcggcgacgaaaatttaacggatatcataaatacaagacaccagaacgttaaatatttacccaatattgacttgccccataatttggtggccgatcctgatcttttacactccatcaagggtgctgacatccttgttttcaacatccctcatcaatttttaccaaacatagtcaaacaattgcaaggccacgtggcccctcatgtaagggccatcagttgtttgaaagggttcgagttgggctccaagggtgtgcaattgttatcctcctatgttactgatgagttaggaatccaatgtggcgcattatctggtgcaaacttggcaccggaagtggccaaggagcattggtccgaaaccaccgtggcttaccaattaccaaaggattatcaaggtgatggcaaggatgtagatcataagattttgaaattgttattccacagaccttacttccacgtcaatgtcatcgatgatgttgctggtatatccattgccggtgccttgaagaacgtcgtggcacttgcatgtggtttcgtagaaggtatgggatggggtaacaatgcctccgcagccattcaaaggcttggtttaggtgaaattatcaagttcggtagaatgtttttcccagaatccaaagtcgagacctactatcaagaatccgctggtgttgcagatttgatcaccacctgctctggcggtagaaacgtcaaggttgccacatacatggccaagaccggtaagtctgccttggaagcagaaaaggaattgcttaacggtcaatccgcccaagggataatcacatgcagagaagttcacgagtggttacaaacatgtgagttgacccaagaattcccattattcgaggcagtctaccagatagtctacaacaacgtccgcatggaagacttgccggagatgattgaagagttggacatcgatgacgaatga

SEQ ID NO: 10021 - DNA, 1263 bp, Saccharomyces cerevisiae
atgtctaagggaaaagtttgtttggcttattctggtggtttagatacctccgtcattttggcttggctactagaccaaggctacgaagttgtagctttcatggctaatgtagggcaagaagaagatttcgatgccgccaaggaaaaggccttgaagatcggtgcctgcaagttcgtttgtgtggattgtcgtgaagattttgtcaaggatattctattcccagctgtacaggtcaacgctgtgtacgaagacgtttatctgttgggtacctctttggcaagacctgttattgccaaagcccaaattgacgtcgctaaacaggagggctgtttcgcggtctctcatggttgtaccggtaaaggtaatgatcaaatcagattcgaattgtcattttacgctctgaagccagacgttaagtgtattacaccatggagaatgcctgaatttttcgaaagatttgctggcagaaaggatttgttagactatgctgcacaaaagggtattcccgtcgcccaaaccaaggccaagccatggtctactgacgaaaaccaagcccacatttcttacgaggcaggtatcttggaagacccagataccaccccaccaaaggacatgtggaaattgatcgtcgatccaatggatgctccggaccaaccacaagatttgaccattgactttgaacgtggtcttccagtcaagttgacctacaccgacaacaagacttccaaggaagtttccgttaccaagcctttggatgttttcttggccgcatccaacttagcaagggccaacggtgttggtagaatcgatattgtagaagatcgttacattaacttgaaatccagaggttgttacgaacaggctccattgactgttttgagaaaagctcatgttgatttggaaggtttgactttagacaaagaagtccgtcaattgagagactcattcgtcacaccaaactactccagattgatatataacggttcctacttcaccccagagtgtgagtacatcagatctatgatccaaccatcccaaaatagcgttaacggtactgtcagggttagactgtataagggtaacgtcatcattctgggcagatctacaaagactgaaaagttgtacgatccgacagaatcctctatggatgagttgaccggtttcttacctaccgataccaccggtttcattgccatccaggccattagaattaaaaaatacggtgaatccaaaaaaaccaaaggtgaagagttgactttgtaa

SEQ ID NO: 10022 - DNA, 1263 bp, Artificial Sequence
  Description of Artificial Sequence: Synthetic polynucleotide
atgtctaagggaaaagtttgtttggcttattctggtggtttagatacctccgtcattttggcttggttgttggaccaaggctacgaagttgtagctttcatggctaatgtagggcaagaagaagatttcgatgccgccaaggaaaaggccttgaagatcggtgcctgcaagttcgtttgtgtggattgtcgtgaagattttgtcaaggatattcttttcccagctgtacaggtcaacgctgtgtacgaagacgtttatcttttgggtacctctttggcaagacctgttattgccaaagcccaaattgacgtcgctaaacaggagggctgtttcgcggtctctcatggttgtaccggtaaaggtaatgatcaaatcagattcgaattgagtttttacgctttgaagccagacgttaagtgtattacaccatggagaatgcctgaatttttcgaaagatttgctggcagaaaggatttgttagactatgctgcacaaaagggtattcccgtcgcccaaaccaaggccaagccatggtctactgacgaaaaccaagcccacatttcttacgaggcaggtatcttggaagacccagataccaccccaccaaaggacatgtggaaattgatcgtcgatccaatggatgctccggaccaaccacaagatttgaccattgactttgaacgtggtcttccagtcaagttgacctacaccgacaacaagacttccaaggaagtttccgttaccaagcctttggatgttttcttggccgcatccaacttagcaagggccaacggtgttggtagaatcgatattgtagaagatcgttacattaacttgaaatccagaggttgttacgaacaggctccattgactgttttgagaaaagctcatgttgatttggaaggtttgactttagacaaagaagtccgtcaattgagagactctttcgtcacaccaaactactccagattgatatataacggttcctacttcaccccagagtgtgagtacatcagatctatgatccaaccatcccaaaatagcgttaacggtactgtcagggttagattatataagggtaacgtcatcattttgggcagatctacaaagactgaaaagttgtacgatccgacagaatcctctatggatgagttgaccggtttcttacctaccgataccaccggtttcattgccatccaggccattagaattaaaaaatacggtgaatccaaaaaaaccaaaggtgaagagttgactttgtga

SEQ ID NO: 10023 - DNA, 2136 bp, Saccharomyces cerevisiae
atgagccactttttcgccgatcatgatgctcctctgagcatgctttctgttaaaacagaatactttcctcaattgactgataaggaacaaaaatatgcgcatttcatgtcaaaggcctcccatgcgggttcaagggttgtaatgagacaagtttctcatgagagtgagccaatttttgacctaatccttgccattcattcaaagctaaacggcaagtacccagaggacgatattacgcagaagcagcaaacgggtttgtatttggaatacgtttctcaattcttatctaatttgggtaatttcaaatcgtttggtgacactaagtttattcctcgttgtgaggtaaaattcttcaaacagcttttggagctggccaagattaatccgtgttcttctccgctcactttatctcctgttgacgttaaccatgaattcacatctcatcatcttttttccaccatcaatgagctaattgatattggtatttaccatgtggaagagaaggcggctctcttagggtttccctctcaaggttatacttcagcctattatctgggtttacctgtgacacctgaagatatggctcttttgaaagagcagttgtttgctgaacttgccatcttgcctgaaaacacaagaatcaacaaagttggtgaaaacagtttccaaatctgggttgcctctgagaatgtgaaaaaccagataacagaaacctaccccagtggacagatcacattatccaatgctgtaaccaaagtagaattcatttttggtgatcattcacgtgaaatgcgtttagtagcatcgtatttaaaggaagctcaaaaattcgcggctaatgatactcaaaaagcaatgcttcaggaatacatcaaccactttgtcactggctcttctcaagcacataaagaagcacaaaaactttgggtcaaagatatatctcccgtcattgaaacaaatatcggttttatcgaaacatatagagaaccctcgggcataattggagaatttgaatcgttggttgcaattcaaaacaaagaacgtactgctaaattttccagcttggttaacaacgcagaagaattcatttccttactaccatggtctaaagattacgaaaaaccgattttcaatccaccagatttcacctctctagaagtattaacgtttactggatcgggtataccagcgggcatcaatattccaaactatgatgatgttcggcttaaaattgggttcaagaatgtttctttggggaatatcttaagcgcggctgccaaaagctcatccaagcatccgccaagttttatatcgcaagaagatcgcccaatttttgaaaaatatcaaagtgattcttttgaagtccaagtaggcatccatgaattattaggacatggttcaggaaagttgttgacagaatttacagacggctttaattttgataaggaaaaccctcctttaggtttggatgggaaaccggtgagcacatactacaaagttggtgaaacttggggttccaaatttggacagttagctggcccatttgaagaatgtcgtgcggaagtaattgccatgtttttgcttactaataagaagattcttgatatttttggtttccatgatgtcgaatctcaagataaagtgatctacgctggatatctacaaatggcccgtgcgggtctcctagctttagaatactggaatccaaaaactggtaagtggggacaaccacacatgcaagcaagattttctatcatgaaaacatttatgaagcactctacagataagaatttcttaaagttggagatgaacagcacgaatgatgattttgccatcaagttggataaatctctcattaaaacagcgggacatgaatgtgtgaaagactatttaaagcatttgcatgtttacaaatgttcaggcgatgtggaacagggaagtaagtactttattgatagatcaacggtgacaccggatttggcgtctttaagagacatcgtcttatctaagagattgccaaggagacaattcatacaatcgaattcttatattgacgacaataacaaggtaaccctgaaagaatatgatgaaaccccacagggtatgctccaatctttccttgatagagaattatga

SEQ ID NO: 10024 - DNA, 2136 bp, Artificial Sequence
  Description of Artificial Sequence: Synthetic polynucleotide
atgagccactttttcgccgatcatgatgctcctttaagcatgctttctgttaaaacagaatactttcctcaattgactgataaggaacaaaaatatgcgcatttcatgtccaaggcctcccatgcgggttctagggttgtaatgagacaagtttctcatgagagtgagccaatttttgacttgatccttgccattcattctaagttgaacggcaagtacccagaggacgatattacgcagaagcagcaaacgggtttgtatttggaatacgtttctcaattcttatctaatttgggtaatttcaaaagttttggtgacactaagtttattcctcgttgtgaggtaaaattcttcaaacagcttttggagttggccaagattaatccgtgttcttctccgctcactttatctcctgttgacgttaaccatgaattcacatctcatcatcttttttccaccatcaatgagttgattgatattggtatttaccatgtggaagagaaggcggctctcttagggtttccctctcaaggttatacttctgcctattatttgggtttacctgtgacacctgaagatatggctcttttgaaagagcagttgtttgctgaacttgccatcttgcctgaaaacacaagaatcaacaaagttggtgaaaacagtttccaaatctgggttgcctctgagaatgtgaaaaaccagataacagaaacctaccccagtggacagatcacattatccaatgctgtaaccaaagtagaattcatttttggtgatcattctcgtgaaatgcgtttagtagcaagttatttaaaggaagctcaaaaattcgcggctaatgatactcaaaaagcaatgcttcaggaatacatcaaccactttgtcactggctcttctcaagcacataaagaagcacaaaaactttgggtcaaagatatatctcccgtcattgaaacaaatatcggttttatcgaaacatatagagaaccctctggcataattggagaatttgaatctttggttgcaattcaaaacaaagaacgtactgctaaattttccagcttggttaacaacgcagaagaattcatttccttattaccatggtctaaagattacgaaaaaccgattttcaatccaccagatttcacctctttggaagtattaacgtttactggatctggtataccagcgggcatcaatattccaaactatgatgatgttcgtcttaaaattgggttcaagaatgtttctttggggaatatcttaagcgcggctgccaaaagctcttccaagcatccgccaagttttatatctcaagaagatcgcccaatttttgaaaaatatcaaagtgattcttttgaagtccaagtaggcatccatgaattattaggacatggttctggaaagttgttgacagaatttacagacggctttaattttgataaggaaaaccctcctttaggtttggatgggaaaccggtgagcacatactacaaagttggtgaaacttggggttccaaatttggacagttagctggcccatttgaagaatgtcgtgcggaagtaattgccatgtttttgcttactaataagaagattcttgatatttttggtttccatgatgtcgaatctcaagataaagtgatctacgctggatatttacaaatggcccgtgcgggtctcttggctttagaatactggaatccaaaaactggtaagtggggacaaccacacatgcaagcaagattttctatcatgaaaacatttatgaagcactctacagataagaatttcttaaagttggagatgaacagcacgaatgatgattttgccatcaagttggataaatctctcattaaaacagcgggacatgaatgtgtgaaagactatttaaagcatttgcatgtttacaaatgttctggcgatgtggaacagggaagtaagtactttattgatagatctacggtgacaccggatttggcgtctttaagagacatcgtcttatctaagagattgccaaggagacaattcatacaaagcaattcttatattgacgacaataacaaggtaaccttgaaagaatatgatgaaaccccacagggtatgctccaatctttccttgatagagaattatga

SEQ ID NO: 10025 - DNA, 912 bp, Saccharomyces cerevisiae
atgactgttactgacacttttaaactgtttattttaaggcatggtcaaagtgaattaaactcagaaaacatattctgcggatggattgatgctcaattaacggaaaaagggaagtctcaggcccgccactctgcaaaattgatcaagcagttttgcgattctaacaatatctctttgcctcagattggctatacttcaaggttgattcgaactcagcagaccatggacgttattctcgaagagttgggactaaaacacaccaattatgtaattactacgaatacaaacattaaggaggagctgcaggacacaagatttgaaggaagtatgcctgtgttgcaaacctggaggttaaatgagcgtcattacggcgcatggcaaggacaaagaaagccagatatcttgaaagaatacggtaaggaaaaatacatgtatatcagaagagattacaacggaaaaccccctaaagtcaacctaaacctggaaatggtccaagaggaaaatgatcaggggtcctccacaggctatgattttaaggagcccaatagacacttaaaatacggccccgaagagaaggctaatgagcgtctgccagaaagtgagtctctttgtgaagtggtcgtcagattgaaaccatttttaaataatgttgttctgtctaccgccaacaaaatcagtcaagaatcgtgtgttatagttgggcatggcagctctgtaagatctctgctgaaagtattggaaggtatctcagatgaagacatcaaagatgtcgatattcccaacggcattccgctagttatagagttggatagagacaattactcttttgtgaggaaattttacttggatccagaatcagctaaagttaatgctcaaatggttcgtgatgagggtttcgaaaagaatccatga

SEQ ID NO: 10026 - DNA, 912 bp, Artificial Sequence
  Description of Artificial Sequence: Synthetic polynucleotide
atgactgttactgacacttttaaattatttattttaaggcatggtcaaagtgaattaaactctgaaaacatattctgcggatggattgatgctcaattaacggaaaaagggaagtctcaggcccgccactctgcaaaattgatcaagcagttttgcgattctaacaatatctctttgcctcagattggctatacttctaggttgattagaactcagcagaccatggacgttattctcgaagagttgggattgaaacacaccaattatgtaattactacgaatacaaacattaaggaggagttacaggacacaagatttgaaggaagtatgcctgtgttgcaaacctggaggttaaatgagcgtcattacggcgcatggcaaggacaaagaaagccagatatcttgaaagaatacggtaaggaaaaatacatgtatatcagaagagattacaacggaaaaccccctaaagtcaacttgaacttggaaatggtccaagaggaaaatgatcaggggtcctccacaggctatgattttaaggagcccaatagacacttaaaatacggccccgaagagaaggctaatgagcgtttgccagaaagtgagtctctttgtgaagtggtcgtcagattgaaaccatttttaaataatgttgttttatctaccgccaacaaaatcagtcaagaaagttgtgttatagttgggcatggcagctctgtaagatctttattgaaagtattggaaggtatcagtgatgaagacatcaaagatgtcgatattcccaacggcattccgttggttatagagttggatagagacaattactcttttgtgaggaaattttacttggatccagaatctgctaaagttaatgctcaaatggttcgtgatgagggtttcgaaaagaatccatga

SEQ ID NO: 10027 - DNA, 1656 bp, Saccharomyces cerevisiae
atgacctattctacagttagcatcaacacgcctccaccatatcttactttagcctgcaacgaaaagttgccaacagttttatccattgctggaacagatccaagtggtggagccggtatcgaagctgatgtcaaaactatcacagcacacagatgttatgccatgacatgtatcactgctttaaatgctcaaactccagttaaagtctacagcataaataacacaccaaaagaagtggttttccaaactttggaatccaatttaaaggatatgaaatgtaatgttatcaaaaccggtatgcttaccgcagctgctatcgaagtcttgcacgaaaaactgctgcaactcggcgaaaatagacctaagttggttgttgatccagttcttgtcgctacttctggttcttctttagctggaaaggatatagttagtttgattacggagaaggttgcaccttttgctgatattttgactcctaacatcccagagtgttacaaattgttaggtgaggaaagaaaggttaacggattacaggatattttccaaatcgcaaaagaccttgctaaaataaccaagtgttcgaatatactagtgaagggtggccatattccatggaatgatgaaaaggaaaagtacattaccgacgttcttttcttgggtgctgaacaaaaattcattatctttaaaggcaatttcgttaacaccacgcatacacatggtactgggtgcacactagcttctgccattgcatcaaacttggctcgtggttattctcttcctcagtctgtttatggtggtattgaatacgtccaaaatgccgtggcaattggttgtgatgtcacaaaagaaactgtcaaggataatggaccaattaatcatgtttacgccgtggaaattccattggagaaaatgctcagtgatgaatgttttactgcatcggatgttatacctaaaaagccgctcaaaagtgctgctgacaaaatcccaggcggtaatttctatgaatacctgatcaatcaccctaaagttaagccacactgggattcctatattaaccatgagtttgttaaaaaggttgcggacggtacattagaacgtaagaagtttcagttctttattgaacaagattatgcatacttggttgattatgctagagttcattgtatcgcgggtagtaaagctccatgcctagaagatatggaaaaggagctagtcattgttggaggtgttcgtactgaaatgggtcaacatgaaaagagattaaaagaagtatttggtgttaaagatcctgattactttcaaaagattaagagaggacctgcattaagagcttactctcgttactttaacgatgtttccagaagaggtaactggcaagaattggttgcatcccttactccttgtttgatgggttatggtgaagctttaactaaaatgaagggtaaagtcaccgcacctgaagggtccgtttaccacgaatggtgtgaaacttacgcatcttcatggtatcgtgaagccatggatgaaggtgaaaaacttttgaaccacatcttagaaacataccctccagagcaacttgacactttagtaacaatctacgctgaagtttgtgaattagaaacaaatttttggaccgctgcgctagaatacgagtag

SEQ ID NO: 10028 - DNA, 1656 bp, Artificial Sequence
  Description of Artificial Sequence: Synthetic polynucleotide
atgacctattctacagttagcatcaacacgcctccaccatatcttactttagcctgcaacgaaaagttgccaacagttttatccattgctggaacagatccaagtggtggagccggtatcgaagctgatgtcaaaactatcacagcacacagatgttatgccatgacatgtatcactgctttaaatgctcaaactccagttaaagtctacagcataaataacacaccaaaagaagtggttttccaaactttggaatccaatttaaaggatatgaaatgtaatgttatcaaaaccggtatgcttaccgcagctgctatcgaagtcttgcacgaaaaattattacaactcggcgaaaatagacctaagttggttgttgatccagttcttgtcgctacttctggttcttctttagctggaaaggatatagttagtttgattacggagaaggttgcaccttttgctgatattttgactcctaacatcccagagtgttacaaattgttaggtgaggaaagaaaggttaacggattacaggatattttccaaatcgcaaaagaccttgctaaaataaccaagtgttctaatatattggtgaagggtggccatattccatggaatgatgaaaaggaaaagtacattaccgacgttcttttcttgggtgctgaacaaaaattcattatctttaaaggcaatttcgttaacaccacgcatacacatggtactgggtgcacattggcttctgccattgcatctaacttggctcgtggttattctcttcctcagtctgtttatggtggtattgaatacgtccaaaatgccgtggcaattggttgtgatgtcacaaaagaaactgtcaaggataatggaccaattaatcatgtttacgccgtggaaattccattggagaaaatgctcagtgatgaatgttttactgcatctgatgttatacctaaaaagccgctcaaaagtgctgctgacaaaatcccaggcggtaatttctatgaatacttgatcaatcaccctaaagttaagccacactgggattcctatattaaccatgagtttgttaaaaaggttgcggacggtacattagaacgtaagaagtttcagttctttattgaacaagattatgcatacttggttgattatgctagagttcattgtatcgcgggtagtaaagctccatgcttagaagatatggaaaaggagttggtcattgttggaggtgttcgtactgaaatgggtcaacatgaaaagagattaaaagaagtatttggtgttaaagatcctgattactttcaaaagattaagagaggacctgcattaagagcttactctcgttactttaacgatgtttccagaagaggtaactggcaagaattggttgcatcccttactccttgtttgatgggttatggtgaagctttaactaaaatgaagggtaaagtcaccgcacctgaagggtccgtttaccacgaatggtgtgaaacttacgcatcttcttggtatcgtgaagccatggatgaaggtgaaaaacttttgaaccacatcttagaaacataccctccagagcaacttgacactttagtaacaatctacgctgaagtttgtgaattagaaacaaatttttggaccgctgcgttagaatacgagtga

SEQ ID NO: 10029 - DNA, 1221 bp, Saccharomyces cerevisiae
atgggcgacgaattacacaaccgtttacttcaccaaaacgatggcaccaaggacgccatactttataagataatagaatcgttagtttgctccatctgccacgattatatgtttgtaccgatgatgacaccttgtggtcataattattgctatggttgtctgaacacctggtttgccagcaatactcaaaaagaattggcttgtccgcagtgcagatctgatattaccaccattcccgcattgaatacaacgttgcaacagtatctatcattcattttagagaaattaagggaccagaatgatgaatcttttaaaaaacttttaacaactaaaaccaaggaggaaaatgattacaagaatgacaaggaaaaggacacattgtttgacaaagtatttaagaatagcgcattggcagtggccgacgactcggatgatggtatcacacgttgtagtaattgtcattgggaattagacccagacgaagtagaggacggaaatgtttgtccccactgcaatgccagaatacggaattacgcaggtggtcgcgacgaatttgatgaagaagaatacagtgaaggagagttggatgaaatccgggaaagcatgcgtaggcgtagagagaatcgatttgcgtctaccaatccgtttgctaatagagatgatgtaagttctgaagacgatgatagcagtgaagaggagcccatgcgagaacatatcccactaggccgttgggccaggtcacataatcgtagtattgctgtggatgctgtggatgatgaagacgacgaagaagaggatgaggaagaagaagaggagatggattccgatttgaaagattttatagaggatgatgaagatgacgaagatgaagatggaagtaggaggaatttggtattgtctgcactcaagaacagacatgtaattattactgatgatgaggaagaggagcaacggcgacatgctacagaagaggaagatcgcgatagtgacttttacgagcataatgatgatggttttgtaagtggtgatagccttgatgaggatcagaaggaggttacacggatacaatcgagttctgattccgaagatcgttcactttcgtattccggctccagcgatgtcaaggataacaatgacgataacacggaagaattagatgacccacaaccgaaaaggcagaaacgcttccgtgtagttctaggagacagtgacgatgaataa

SEQ ID NO: 10030 - DNA, 1221 bp, Artificial Sequence
  Description of Artificial Sequence: Synthetic polynucleotide
atgggcgacgaattacacaaccgtttacttcaccaaaacgatggcaccaaggacgccatactttataagataatagaatctttagtttgctccatctgccacgattatatgtttgtaccgatgatgacaccttgtggtcataattattgctatggttgtttgaacacctggtttgccagcaatactcaaaaagaattggcttgtccgcagtgcagatctgatattaccaccattcccgcattgaatacaacgttgcaacagtatttatctttcattttagagaaattaagggaccagaatgatgaatcttttaaaaaacttttaacaactaaaaccaaggaggaaaatgattacaagaatgacaaggaaaaggacacattgtttgacaaagtatttaagaatagcgcattggcagtggccgacgacagtgatgatggtatcacacgttgtagtaattgtcattgggaattagacccagacgaagtagaggacggaaatgtttgtccccactgcaatgccagaataagaaattacgcaggtggtcgcgacgaatttgatgaagaagaatacagtgaaggagagttggatgaaatcagagaaagcatgcgtaggcgtagagagaatagatttgcgtctaccaatccgtttgctaatagagatgatgtaagttctgaagacgatgatagcagtgaagaggagcccatgagagaacatatcccattaggccgttgggccaggagccataatcgtagtattgctgtggatgctgtggatgatgaagacgacgaagaagaggatgaggaagaagaagaggagatggattccgatttgaaagattttatagaggatgatgaagatgacgaagatgaagatggaagtaggaggaatttggtattgtctgcactcaagaacagacatgtaattattactgatgatgaggaagaggagcaaagaagacatgctacagaagaggaagatcgcgatagtgacttttacgagcataatgatgatggttttgtaagtggtgatagccttgatgaggatcagaaggaggttacaagaatacaaagtagttctgattccgaagatcgttctctttcctattccggctccagcgatgtcaaggataacaatgacgataacacggaagaattagatgacccacaaccgaaaaggcagaaacgcttccgtgtagttttaggagacagtgacgatgaatga

SEQ ID NO: 10031 - DNA, 1188 bp, Saccharomyces cerevisiae
atgtgggggttatgcaagaagcattttccgagcaataaaattcaagtgcaggagagaaacaaagcattaaaaccaaagaagagtggcagcgaacataagacaaagcaactgtttcctgtattcaattgcaagaagaaggaaaaaggggtaatgatacggtttgcgattctacgtaatgctaacacatctctactgtccgcgagaagtatatgcttatttacccaggcgcctacctattgtcatgtaaggttgaataccttgaataaaagcattacaactaaaagaaattcattgacagagtcgaaaaggcatgtccatgatggcaagcatttttttacgacgccacatcaacagcaacagacgaagttgggggaaattgaagagggacacagtcctaacataaaaggagaggacttgagaagcattggtcaagcaataacacatcagcgaaacaagcgccgaaagcaaatatggtccgccatatttggtggtatattcggtgtgatattaggatactcactaatctatagagtgatatatttaaaggaacaaagtttcttaccattgtttccatcatccaagatacgtaaactgagtaccagagatttgaaaaaggttgacgtaaaccaagtacagaagctttctaaattaagggttttagagatattatccggtcatgacatgatcaaggaacaatacggagtaccattgcttgataaagatggcaattcacccacgttaaatgaattcagcatgtggtgcgaagatcaagatccatgtgtaactggtattgtaatggagccagacgataaaagggatagttcgcacacttggtatagaataccctttgtttgcaaatggaggataacgcatcggccaataagtatacggggaaccatcgacgatttactgaaccgcattggtttggaaacagccgatttatttgagattatatcgccggagagggtatacgggtcgttcaagtacgaatacccactgcagggggactcacatgcattacacctttggtttcatggcgaaatcgaactggacgatgattctttgattgtatataatggaaaataccacgttgatgttaaattgcaagaaatcgacctcttcagacgtgaaaagaacggacaactaatacagtacgttctatacaaaaacgaagcgggcgacaagtaa

SEQ ID NO: 10032 - DNA, 1188 bp, Artificial Sequence
  Description of Artificial Sequence: Synthetic polynucleotide
atgtgggggttatgcaagaagcattttccgagcaataaaattcaagtgcaggagagaaacaaagcattaaaaccaaagaagagtggcagcgaacataagacaaagcaattatttcctgtattcaattgcaagaagaaggaaaaaggggtaatgataagatttgcgattttgcgtaatgctaacacatctttattatccgcgagaagtatatgcttatttacccaggcgcctacctattgtcatgtaaggttgaataccttgaataaaagcattacaactaaaagaaattctttgacagagagtaaaaggcatgtccatgatggcaagcatttttttacgacgccacatcaacagcaacagacgaagttgggggaaattgaagagggacacagtcctaacataaaaggagaggacttgagaagcattggtcaagcaataacacatcagagaaacaagcgcagaaagcaaatatggtccgccatatttggtggtatattcggtgtgatattaggatactctttgatctatagagtgatatatttaaaggaacaaagtttcttaccattgtttccatcttccaagatacgtaaattaagtaccagagatttgaaaaaggttgacgtaaaccaagtacagaagctttctaaattaagggttttagagatattatccggtcatgacatgatcaaggaacaatacggagtaccattgcttgataaagatggcaattctcccacgttaaatgaattcagcatgtggtgcgaagatcaagatccatgtgtaactggtattgtaatggagccagacgataaaagggatagttctcacacttggtatagaataccctttgtttgcaaatggaggataacgcatagaccaataagtataagaggaaccatcgacgatttattaaaccgcattggtttggaaacagccgatttatttgagattatatctccggagagggtatacgggtctttcaagtacgaatacccattacagggggactctcatgcattacacctttggtttcatggcgaaatcgaattagacgatgattctttgattgtatataatggaaaataccacgttgatgttaaattgcaagaaatcgacctcttcagacgtgaaaagaacggacaattgatacagtacgttctttacaaaaacgaagcgggcgacaagtga

SEQ ID NO: 10033 - DNA, 186 bp, Saccharomyces cerevisiae
atgaaagtatcacaagttttcatttctgccatctctgtcttcggcctcgctactagcgtaaatgctcaaaacgcatccaacaccacgagtaacgctgctcctgctttgcacgctcaaaatggtcaactactaaacgccggagtcgtcggtgctgctgttggtggtgctttggcctttttgatttag

SEQ ID NO: 10034 - DNA, 186 bp, Artificial Sequence
  Description of Artificial Sequence: Synthetic polynucleotide
atgaaagtatctcaagttttcatttctgccatctctgtcttcggcctcgctactagcgtaaatgctcaaaacgcatccaacaccacgagtaacgctgctcctgctttgcacgctcaaaatggtcaattattaaacgccggagtcgtcggtgctgctgttggtggtgctttggcctttttgatttga

SEQ ID NO: 10035 - DNA, 1191 bp, Saccharomyces cerevisiae
atgactgtcaccataaaagaattgactaaccacaactacattgaccacgaactatcagccactttagactcaacggatgcgttcgagggtcccgagaagttgctggaaatctggttcttccctcacaagaagtccatcacgaccgaaaagacattaagaaatattggcatggatagatggatcgagattttgaaattagtgaaatgcgaagttctttccatgaagaagactaaagaactggatgcctttttgttgagtgagtcttccctcttcgtcttcgatcacaaattgacgatgaagacgtgcggtactacaaccacattgttctgtctcgaaaagcttttccagatcgttgagcaagagttatcgtgggctttccgcacaacacaagggggcaagtacaaaccatttaaagtgttttattctagacgatgtttccttttcccctgtaagcaagccgctatccatcaaaactgggctgacgaagtcgactatttgaacaaatttttcgacaatggtaaaagttattccgtgggaagaaatgacaagagcaaccactggaacctgtacgtcaccgagacggaccgctccacacctaagggaaaggagtacatcgaggatgacgacgaaactttcgaagtactgatgacggagctggacccagaatgcgctagtaagtttgtttgcgggcctgaggcatccacaaccgctctcgtggagccaaacgaagataagggccacaacctcggctaccaaatgactaaaaatacaaggcttgacgaaatatatgtcaactcggcccaagactccgatttatcatttcaccacgatgcatttgcgttcacgccatgtggatactcatccaatatgattctcgctgaaaaatactattacaccctgcacgtgactccggaaaagggttggtcttacgcctctttcgaaagtaacatacccgtatttgacatttcccaagggaagcaagacaacttggacgttcttctacatattctgaacgtttttcaaccaagagagttctcgatgaccttttttaccaaaaattatcagaaccaatccttccaaaaactactaagcatcaacgagtcactgcccgactacatcaagttagacaaaattgtttatgatctggacgactaccaccttttctatatgaaattgcagaagaaaatatga

SEQ ID NO: 10036 - DNA, 1191 bp, Artificial Sequence
  Description of Artificial Sequence: Synthetic polynucleotide
atgactgtcaccataaaagaattgactaaccacaactacattgaccacgaattatctgccactttagacagtacggatgcgttcgagggtcccgagaagttgttggaaatctggttcttccctcacaagaagtccatcacgaccgaaaagacattaagaaatattggcatggatagatggatcgagattttgaaattagtgaaatgcgaagttctttccatgaagaagactaaagaattagatgcctttttgttgagtgagtcttccctcttcgtcttcgatcacaaattgacgatgaagacgtgcggtactacaaccacattgttctgtctcgaaaagcttttccagatcgttgagcaagagttatcttgggctttccgcacaacacaagggggcaagtacaaaccatttaaagtgttttattctagaagatgtttccttttcccctgtaagcaagccgctatccatcaaaactgggctgacgaagtcgactatttgaacaaatttttcgacaatggtaaaagttattccgtgggaagaaatgacaagagcaaccactggaacctttacgtcaccgagacggaccgctccacacctaagggaaaggagtacatcgaggatgacgacgaaactttcgaagtattaatgacggagttggacccagaatgcgctagtaagtttgtttgcgggcctgaggcatccacaaccgctctcgtggagccaaacgaagataagggccacaacctcggctaccaaatgactaaaaatacaaggcttgacgaaatatatgtcaactctgcccaagactccgatttatcttttcaccacgatgcatttgcgttcacgccatgtggatactcttccaatatgattctcgctgaaaaatactattacaccttacacgtgactccggaaaagggttggtcttacgcctctttcgaaagtaacatacccgtatttgacatttcccaagggaagcaagacaacttggacgttcttttacatattttgaacgtttttcaaccaagagagttctccatgaccttttttaccaaaaattatcagaaccaatccttccaaaaattattaagcatcaacgagtctttacccgactacatcaagttagacaaaattgtttatgatttggacgactaccaccttttctatatgaaattgcagaagaaaatatga

SEQ ID NO: 10037 - DNA, 3246 bp, Saccharomyces cerevisiae
atgtctgctgctcctgtccaagacaaagacactctgtccaatgccgagcgtgcgaagaacgtcaacgggttgcttcaggtgctcatggacattaacactctgaacggagggagctccgacactgctgataagataagaattcatgccaaaaacttcgaggcagctttgttcgcaaagagctcttcaaagaaagaatacatggacagcatgaacgaaaaagttgctgtcatgcgcaacacgtacaatacgaggaaaaacgccgttactgctgctgccgctaataacaacattaaacccgtggaacagcaccatattaacaacttgaaaaattctggcaacagcgccaataatatgaatgtcaatatgaatctaaacccacagatgttcttgaatcagcaggctcaggcaaggcaacaggttgcgcaacaattaagaaatcaacaacaacaacaacaacagcagcagcagcaacagaggcgtcaattgactcctcaacaacaacaattagtgaaccagatgaaagtggcacctattcccaaacaattactgcaaagaattcctaacattccacccaatatcaacacctggcagcaggtcactgctttggctcaacaaaagctattgacacctcaggatatggaagctgcgaaggaagtctacaagattcaccagcagttgctattcaaagcaaggctacagcaacaacaagcacaggctcaagcacaagctaataacaacaacaacggcctcccccaaaatggtaatattaacaataacataaatattcctcaacagcagcaaatgcaacctcccaattcaagtgcgaacaacaaccctttgcaacagcaatcatcacaaaataccgtaccaaacgtcctcaaccaaattaaccaaatcttttctccagaggagcaacgcagcttattacaagaagccatcgaaacctgcaagaattttgaaaaaacacaattgggtagtacgatgacggaacctgtcaagcaaagttttattaggaaatacattaaccaaaaggccctgagaaaaatccaagctttgagagatgttaagaacaacaataacgctaacaacaacggctcgaaccttcagagagcccaaaatgtccctatgaatatcatccaacaacaacaacaacagaacacgaacaataatgacaccattgccacttctgctacacctaatgctgccgctttctctcagcaacagaacgcaagttctaaattatatcagatgcaacaacagcaacaagctcaagctcaagctcaagctcaagctcaggcacaggctcaagcacaagctcaagcacaggcggcacaagcggcgcaagcgcaagcacaagcacaagcacaagcacaagcacaggcacaggcacaggcacaagcccaggcgcaggcccaagcccaagcccaagcacaagcacaagcacacgctcagcaccagccctcccaacaaccacaacaagctcagcaacaacctaacccactacatgggttgacacctactgcaaaggatgtcgaagtaattaagcaattgtccttggatgcttctaagaccaacctaaggcttacggacgtaacaaattctttatccaatgaagaaaaggaaaaaattaaaatgaagttaaagcaaggtcaaaagctttttgttcaggtgagtaatttcgccccacaagtctacatcatcacaaagaatgaaaacttcttgaaggaagtttttcagttaagaatctttgtaaaagagatcctagaaaaatgtgccgagggtatatttgttgttaaattagacaccgttgacaggttaattattaagtatcaaaaatattgggaaagtatgagaattcaaattttaagaagacaagctattttaagacaacaacagcaaatggcaaacaacaatgggaacccaggcactacttctactggaaacaataataatattgcaactcagcaaaatatgcaacagtcactacagcaaatgcagcatttacagcaattgaaaatgcagcagcaacaacaacagcagcaacaacaacagcagcaacaacaacagcagcaacaacaacagcaacagcacatatatccctcctcgactcctggtgtggctaattattcggcaatggctaatgcacccggtaacaatatcccatatatgaaccataaaaatacctctagcatggattttttgaactctatggaaaatacaccaaaagttcccgtatccgctgcggcaaccccatcactgaacaagacgatcaacggtaaggtgaatggcaggacaaaatctaatacgatacctgttaccagcattccatcaacaaataagaaactatcaatttcaaatgccgctagtcaacaacccactcctaggtctgcatcaaataccgctaagtcaaccccaaatacaaatccttctccactgaaaacccaaactaaaaatggcacaccaaaccccaataatatgaagactgtacagtctcctatgggtgcacaaccatcatataatagtgccattatagagaatgcattcagaaaggaagaactcttgttaaaagatttggaaatcaggaagttggagatatcttctcgttttaaacatcgccaagaaattttcaaagattctcctatggatttgtttatgagtacgctgggtgattgcttaggtatcaaagatgaagagatgcttacgtcatgcactatcccaaaggctgtggttgatcacatcaacggctctggcaaaaggaagcctacaaaagcggctcaaagggctcgcgatcaagattccattgacatttccataaaagacaacaaattggttatgaagagtaaattcaataagagcaataggtcgtattcgatagcgttgtccaatgtagctgctatattcaagggtatcggtggtaactttaaagacttgtccactttggttcattcatcatcgccgtccacatcttctaatatggatgtcggcaacccaagaaaaagaaaagccagcgtattagaaataagcccgcaagattcgatagcctcggtgctatcaccagattcaaatataatgagtgattctaaaaaaattaaagtagattctcctgatgacccattcatgacaaaatcaggagccacaactagtgaaaaacaagaagtaacaaatgaagctccatttttaacttctgggactagttcagaacaattcaatgtatgggattggaataattggacaagtgctacttga

SEQ ID NO: 10038 - DNA, 3246 bp, Artificial Sequence
  Description of Artificial Sequence: Synthetic polynucleotide
atgtctgctgctcctgtccaagacaaagacactttatccaatgccgagcgtgcgaagaacgtcaacgggttgcttcaggtgctcatggacattaacactttgaacggagggagctccgacactgctgataagataagaattcatgccaaaaacttcgaggcagctttgttcgcaaagagctcttccaagaaagaatacatggacagcatgaacgaaaaagttgctgtcatgcgcaacacgtacaatacgaggaaaaacgccgttactgctgctgccgctaataacaacattaaacccgtggaacagcaccatattaacaacttgaaaaattctggcaacagcgccaataatatgaatgtcaatatgaatttgaacccacagatgttcttgaatcagcaggctcaggcaaggcaacaggttgcgcaacaattaagaaatcaacaacaacaacaacaacagcagcagcagcaacagaggcgtcaattgactcctcaacaacaacaattagtgaaccagatgaaagtggcacctattcccaaacaattattacaaagaattcctaacattccacccaatatcaacacctggcagcaggtcactgctttggctcaacaaaagttgttgacacctcaggatatggaagctgcgaaggaagtctacaagattcaccagcagttgttattcaaagcaaggttacagcaacaacaagcacaggctcaagcacaagctaataacaacaacaacggcctcccccaaaatggtaatattaacaataacataaatattcctcaacagcagcaaatgcaacctcccaatagtagtgcgaacaacaaccctttgcaacagcaatcttctcaaaataccgtaccaaacgtcctcaaccaaattaaccaaatcttttctccagaggagcaacgcagcttattacaagaagccatcgaaacctgcaagaattttgaaaaaacacaattgggtagtacgatgacggaacctgtcaagcaaagttttattaggaaatacattaaccaaaaggccttgagaaaaatccaagctttgagagatgttaagaacaacaataacgctaacaacaacggctctaaccttcagagagcccaaaatgtccctatgaatatcatccaacaacaacaacaacagaacacgaacaataatgacaccattgccacttctgctacacctaatgctgccgctttctctcagcaacagaacgcaagttctaaattatatcagatgcaacaacagcaacaagctcaagctcaagctcaagctcaagctcaggcacaggctcaagcacaagctcaagcacaggcggcacaagcggcgcaagcgcaagcacaagcacaagcacaagcacaagcacaggcacaggcacaggcacaagcccaggcgcaggcccaagcccaagcccaagcacaagcacaagcacacgctcagcaccagccctcccaacaaccacaacaagctcagcaacaacctaacccattgcatgggttgacacctactgcaaaggatgtcgaagtaattaagcaattgtccttggatgcttctaagaccaacttgaggcttacggacgtaacaaattctttatccaatgaagaaaaggaaaaaattaaaatgaagttaaagcaaggtcaaaagctttttgttcaggtgagtaatttcgccccacaagtctacatcatcacaaagaatgaaaacttcttgaaggaagtttttcagttaagaatctttgtaaaagagatcttggaaaaatgtgccgagggtatatttgttgttaaattagacaccgttgacaggttaattattaagtatcaaaaatattgggaaagtatgagaattcaaattttaagaagacaagctattttaagacaacaacagcaaatggcaaacaacaatgggaacccaggcactacttctactggaaacaataataatattgcaactcagcaaaatatgcaacagtccttacagcaaatgcagcatttacagcaattgaaaatgcagcagcaacaacaacagcagcaacaacaacagcagcaacaacaacagcagcaacaacaacagcaacagcacatatatccctccagcactcctggtgtggctaattattctgcaatggctaatgcacccggtaacaatatcccatatatgaaccataaaaatacctctagcatggattttttgaactctatggaaaatacaccaaaagttcccgtatccgctgcggcaaccccatctttgaacaagacgatcaacggtaaggtgaatggcaggacaaaatctaatacgatacctgttaccagcattccatctacaaataagaaattatccatttctaatgccgctagtcaacaacccactcctaggtctgcatctaataccgctaagtctaccccaaatacaaatccttctccattgaaaacccaaactaaaaatggcacaccaaaccccaataatatgaagactgtacagtctcctatgggtgcacaaccatcttataatagtgccattatagagaatgcattcagaaaggaagaactcttgttaaaagatttggaaatcaggaagttggagatatcttctcgttttaaacatcgccaagaaattttcaaagattctcctatggatttgtttatgagtacgttaggtgattgcttaggtatcaaagatgaagagatgcttacgagttgcactatcccaaaggctgtggttgatcacatcaacggctctggcaaaaggaagcctacaaaagcggctcaaagggctcgcgatcaagattccattgacatttccataaaagacaacaaattggttatgaagagtaaattcaataagagcaataggagttattctatagcgttgtccaatgtagctgctatattcaagggtatcggtggtaactttaaagacttgtccactttggttcattcttcttctccgtccacatcttctaatatggatgtcggcaacccaagaaaaagaaaagccagcgtattagaaataagcccgcaagattctatagcctctgtgctttctccagattctaatataatgagtgattctaaaaaaattaaagtagattctcctgatgacccattcatgacaaaaagtggagccacaactagtgaaaaacaagaagtaacaaatgaagctccatttttaacttctgggactagttctgaacaattcaatgtatgggattggaataattggacaagtgctacttga

SEQ ID NO: 10039 - DNA, 1476 bp, Saccharomyces cerevisiae
atggcacactatccaccttccaaggatcaattgaatgaattgatccaggaagttaaccaatgggctatcactaatggattatccatgtatcctcctaaattcgaggagaacccatcaaatgcatcggtgtcaccagtaactatctatccaaccccaattcctaggaaatgttttgatgaggccgttcaaatacaaccggtattcaatgaattatacgcccgtattacccaagatatggcccaacctgattcttatttacataaaacaactgaagcgttagctctatcagattccgagtttactggaaaactgtggtctctataccttgctaccttaaaatctgcacagtacaaaaagcagaattttaggctaggtatatttagatcagattatttgattgataagaaaaagggtactgaacagattaagcaagtcgagtttaatacagtgtcagtgtcatttgcaggccttagcgagaaagttgatagattgcactcttatttaaatagggcaaacaagtacgatcctaaaggaccaatttataatgatcaaaatatggtcatttctgattcaggataccttttgtctaaggcattggccaaagctgtggaatcgtataagtcacaacaaagttcttctacaactagtgatcctattgtcgcattcattgtgcaaagaaacgagagaaatgtgtttgatcaaaaggtcttggaattgaatctgttggaaaaattcggtaccaaatctgttaggttgacgtttgatgatgttaacgataaattgttcattgatgataaaacgggaaagcttttcattagggacacagagcaggaaatagcggtggtttattacagaacgggttacacaaccactgattacacgtccgaaaaggactgggaggcaagactattcctcgaaaaaagtttcgcaataaaggccccagatttactcactcaattatctggctccaagaaaattcagcaattgttgacagatgagggcgtattaggtaaatacatctccgatgctgagaaaaagagtagtttgttaaaaacttttgtcaaaatatatcccttggatgatacgaagcttggcagggaaggcaagaggctggcattaagtgagccctctaaatacgtgttaaaaccacagcgggaaggtggcggaaacaatgtttataaagaaaatattcctaattttttgaaaggtatcgaagaacgtcactgggatgcatatattctcatggagttgattgaaccagagttgaatgaaaataatattatattacgtgataacaaatcttacaacgaaccaatcatcagtgaactaggaatttatggttgcgttctatttaacgacgagcaagttttatcgaacgaatttagtggctcattactaagatccaaatttaatacttcaaatgaaggtggagtggcggcaggattcggatgtttggacagtattattctttactag

SEQ ID NO: 10040 - DNA, 1476 bp, Artificial Sequence
  Description of Artificial Sequence: Synthetic polynucleotide
atggcacactatccaccttccaaggatcaattgaatgaattgatccaggaagttaaccaatgggctatcactaatggattatccatgtatcctcctaaattcgaggagaacccatccaatgcatctgtgtctccagtaactatctatccaaccccaattcctaggaaatgttttgatgaggccgttcaaatacaaccggtattcaatgaattatacgcccgtattacccaagatatggcccaacctgattcttatttacataaaacaactgaagcgttagctttaagtgattccgagtttactggaaaattatggtctttgtaccttgctaccttaaaatctgcacagtacaaaaagcagaattttaggcttggtatatttagaagtgattatttgattgataagaaaaagggtactgaacagattaagcaagtcgagtttaatacagtgtctgtgtcctttgcaggccttagcgagaaagttgatagattgcactcttatttaaatagggcaaacaagtacgatcctaaaggaccaatttataatgatcaaaatatggtcatttctgattctggataccttttgtctaaggcattggccaaagctgtggaaagttataagtctcaacaaagttcttctacaactagtgatcctattgtcgcattcattgtgcaaagaaacgagagaaatgtgtttgatcaaaaggtcttggaattgaatttattggaaaaattcggtaccaaatctgttaggttgacgtttgatgatgttaacgataaattgttcattgatgataaaacgggaaagcttttcattagggacacagagcaggaaatagcggtggtttattacagaacgggttacacaaccactgattacacgtccgaaaaggactgggaggcaagattattcctcgaaaaaagtttcgcaataaaggccccagatttactcactcaattatctggctccaagaaaattcagcaattgttgacagatgagggcgtattaggtaaatacatctccgatgctgagaaaaagagtagtttgttaaaaacttttgtcaaaatatatcccttggatgatacgaagcttggcagggaaggcaagaggttagcattaagtgagccctctaaatacgtgttaaaaccacagagggaaggtggcggaaacaatgtttataaagaaaatattcctaattttttgaaaggtatcgaagaacgtcactgggatgcatatattctcatggagttgattgaaccagagttgaatgaaaataatattatattacgtgataacaaatcttacaacgaaccaatcatcagtgaattaggaatttatggttgcgttttatttaacgacgagcaagttttatctaacgaatttagtggctctttattaagatccaaatttaatacttccaatgaaggtggagtggcggcaggattcggatgtttggacagtattattctttactga

SEQ ID NO: 10041 - DNA, 1029 bp, Saccharomyces cerevisiae
atgaaagccggaattgagcttataagtcacagccaggcttctcacgccacatatgctaattctatgacccttgcagaaaaggggccacaacgtttaaaaagacaattcaaagaacacagttcttcaaaggaaagtaacgtaagtcgttggctaaagattttcataagacagtttgatatttggtttcctgaaacgataccaacaatgaaagtgagatacgaactgcttagaaaaaacttcattaaagaaattttcaactcaagagcatttatctacccattcttagggttttatgaagtgctgacgaatcctgtttattggaagcatattttactgtttgcggtttgctatgccctgatttttgtcactattgctggtctcttttatgtcacacttgtaccgcttttagtgacatgggccatactgttattagggcctcttggtgtgatactggttcatattcaatggattttacaaacgaatgtcttgactgcctttgtttgtagaacactggtcctgacccatattacgaatcagatatttgatatatctttggtgttgcaagaccaagatgaatttctaaacgaggtgaaggtattgcctaaaccacaaaagccacatagaaaaatcgatgaacctgatgcggtgagaaatttcaacacaataaagggaagtcggatttttaagattcccagattactattcagaatgttttttaaagtctccaattttacttcactaacattactgtcgctaattcctattgtaggaccaatcttggcaaatcaactaatggccccaaaaagaacctttacctatttgcagaggtactttttactaaagggattcagtaagaaacaggccaaagattttcagtacgagcattacgcaagtttcatatgtttcggtatgtctgccggtctactagagttaatacccttcttcacaatagtcaccatatctagcaacactgttggtgcagctaaatggtgtacttcgctactaaagggtgaaagaaagaaggaatga

SEQ ID NO: 10042 - DNA, 1029 bp, Artificial Sequence
  Description of Artificial Sequence: Synthetic polynucleotide
atgaaagccggaattgagcttataagtcacagccaggcttctcacgccacatatgctaattctatgacccttgcagaaaaggggccacaacgtttaaaaagacaattcaaagaacacagttcttccaaggaaagtaacgtaagtcgttggttaaagattttcataagacagtttgatatttggtttcctgaaacgataccaacaatgaaagtgagatacgaattgcttagaaaaaacttcattaaagaaattttcaactctagagcatttatctacccattcttagggttttatgaagtgttaacgaatcctgtttattggaagcatattttactttttgcggtttgctatgccttaatttttgtcactattgctggtctcttttatgtcacacttgtaccgcttttagtgacatgggccatattattattagggcctcttggtgtgatattagttcatattcaatggattttacaaacgaatgtcttgactgcctttgtttgtagaacattggtcttgacccatattacgaatcagatatttgatatatctttggtgttgcaagaccaagatgaatttttgaacgaggtgaaggtattgcctaaaccacaaaagccacatagaaaaatcgatgaacctgatgcggtgagaaatttcaacacaataaagggaagtagaatttttaagattcccagattattattcagaatgttttttaaagtctccaattttacttctttaacattattaagtttgattcctattgtaggaccaatcttggcaaatcaattgatggccccaaaaagaacctttacctatttgcagaggtactttttattgaagggattcagtaagaaacaggccaaagattttcagtacgagcattacgcaagtttcatatgtttcggtatgtctgccggtttattggagttaatacccttcttcacaatagtcaccatatctagcaacactgttggtgcagctaaatggtgtacttctttattgaagggtgaaagaaagaaggaatga

SEQ ID NO: 10043 - DNA, 1071 bp, Saccharomyces cerevisiae
atgtcgactagaccccaacctgattggtattaccatagacatccatatgcctctacgccactggcagaaggggaggaaccacaattactccccatccaagaccaagggaaccataagaaatcaaaaatttggatggcatacaaggctccgatagttcgatggtacaagaatgctatgcttgttaaagacaatttttggaaagacctagagtcgtcgcaccagatcatctggtatccgtataaaggaattagcgaatccgtgggaaactcggattatttgcatctatttttcctaatatttggatactacctgctgaatctcctgcttattgttgcgtttacgtcaatccttgcgtggtccttgttagtgtgcatctatttgccctttctcggactctttgcgttacctctggcttatatgcaaactattctgatttccacaacgctatgtaattctatggtgaagggtaccgatttcgttcttttcacacgtatttatggagtgacgttcgcaagaaagggattaacagagttgagtgaagcctgtgaaacgataagtttcacgccctttgtctacagaaggtcacatcgtttgggtggcctcttttcgaaacggttttacctcgtctctttgccgcagtttttcatttttttcttctggtacatcttcatagcctttatgtttcttttattgttgctcgttccaatagtgggtccaattacaatcaatatgctaccatttagccccggaatgggattttactattttgagccttattttgttgacgtgctacatttggattcgcgcaaactttccaaagtttactacaagggctttgccaagtggctcctttactcgatatccagcggtttattagagtctattcccattctgggtgggttgttcattggaacaaacgcagtaggtgcttcgctttggatagttaaagagataaaagaccgggaccagccagccgtacctccttcccctcctgcggaaccagaagagcctactgtaggatcctatgcacctccaatccaacaatctatagctcacattaatccgccatga

SEQ ID NO: 10044 - DNA, 1071 bp, Artificial Sequence
  Description of Artificial Sequence: Synthetic polynucleotide
atgtctactagaccccaacctgattggtattaccatagacatccatatgcctctacgccattggcagaaggggaggaaccacaattactccccatccaagaccaagggaaccataagaaatctaaaatttggatggcatacaaggctccgatagttcgttggtacaagaatgctatgcttgttaaagacaatttttggaaagacttggagagttctcaccagatcatctggtatccgtataaaggaattagcgaatccgtgggaaacagtgattatttgcatttatttttcttgatatttggatactacttgttgaatctcttacttattgttgcgtttacgtccatccttgcgtggtccttgttagtgtgcatctatttgccctttctcggactctttgcgttacctttggcttatatgcaaactattttaatttccacaacgttgtgtaattctatggtgaagggtaccgatttcgttcttttcacacgtatttatggagtgacgttcgcaagaaagggattaacagagttgagtgaagcctgtgaaacgataagtttcacgccctttgtctacagaaggagccatcgtttgggtggcctcttttccaaaagattttacctcgtctctttgccgcagtttttcatttttttcttctggtacatcttcatagcctttatgtttcttttattgttgctcgttccaatagtgggtccaattacaatcaatatgcttccatttagccccggaatgggattttactattttgagccttattttgttgacgtgttacatttggattctcgcaaactttccaaagtttactacaagggctttgccaagtggctcctttactctatatccagcggtttattagagtctattcccattttgggtgggttgttcattggaacaaacgcagtaggtgcttctctttggatagttaaagagataaaagacagagaccagccagccgtacctccttcccctcctgcggaaccagaagagcctactgtaggatcctatgcacctccaatccaacaatctatagctcacattaatccgccatga

SEQ ID NO: 10045 - DNA, 3306 bp, Saccharomyces cerevisiae
atgacatacccggttagtgcagccgctcctgccgacatttcatattctaaaaataccccgttggtagggctctctaaacctccatgcttgtaccaacacgcttcctcgtccgtcgattcgttttcgtcaacattcagtgatgatgatcgttcggaccttgttgctgtacctaatgagtcgccgcatgcattttcgtataatcccatatcaccaaactcactgggagtaaggttgaccatcttaagaaggtctttggaaataatggtaaacagtcctgacatcttacatgagttgaagaaaaaagcacccgtaatagcataccccccctcacttagacacacaagaaacttaacagagactgccacgttatcagcatcgcgagatccgttaaatgggtctctaatttcaccattagtatccaatatgccatctcctgctagtagacccgtgatacagagagcaacgtccttaatggtgttgcctgataatgatactgccagtaaactgaatccagccaagtccgagttagaaaacttgttattcttgctaaatttagcattggaaaacaattccttcgaaagagcttccgatttacacatgctatcgttattgaatatcaagaaaataaactttgattcagacattcaaaaatcagaaactttgaaaaaggttttattagatagtttagcagaaccattttttgaaaactacaagaagttccctcacaaagatttaggttcgaaatcgcaatataatgaatatgaggagaaacacgatgatatagtctccttagcagacatcaaaccacaacaggactatagccgaattcttcatcctttcacatctgcaaaaaattctggtccagaggccatttttacatgttctcaacaatacccctggaacttcaaagctgccaatgatttggcgtgtctaacgttcggtatatcaaagaatgttatcaaggcacttactttactagaccttattcatacggatagcagaaattttgttctagagaaaatcatgaatgcagaagatgataaccaagaaattgtgtttaccggagaaactatacctatcgtccagccaaattcgacaagcaataataatgtaccaaatctgatttgggcttcactatgggccaagcggaagaatggcctactggtctgcgtatttgaaaaaacgccttgcgattacattgacgtcatgttaaacttgagagatttttcagtggacagcattattgatacaacacactttctggaaaactttgacaagaaaaagcagcaagaatcaacttcgccaatgacagaaaagaaaacggtaaaatttgcaaatgaaattcacgatattgggtcagtaagtcactcactgagtaaactaattgatgatgtacgttttggaaaagtgttttctgcagatgatgatttattacccttgtctatcagggtggcaaatcatgtcaacgaagagagatattttacgttgaattgtctatctgaaaatataccatgtgctgttacaacttccgtattggaaaacgaaataaaattaaaaattcatagtttgccctatcaggctgggctatttattgttgacagtcacactttaagtcttttaagtttcaacaaatcagtcgccaaaaacatgtttggcttgcgacttcacgagttggccggtagttcggttactaagttggttccttctttggcggacatgatatcttatatcaataaaacttatcctatgttaaatatcacattaccagaaaataaaggattggttttaacagaacattttttcagaaaaattgaggctgaaatgcatcatgataaggactcgttttacacttctattggtctagacggctgtcacaaagatggtaatttgataaaggtggatgttcaattacgggtcttgaatacgaatgctgtattattatggattacacactcaagagacgtggtcattgaaaattataccaccgttccttcgcagctaccgatgttaaaggagaacgaaattgatgtcgttggcagtagaggtagttccagtgcatcttccaagaaatcttcggaaaaaattcctgtgaatactttgaaggcaatggctgatctgtcgattagctccgctgaaacgatttctaattcagacgatgaagtagacttaaatcaagtgaatgaaaaactacgagaaacttcttgcggtaaagtgagaggtatcgaatctaatgacaacaataactatgacgatgacatgacaatggttgatgatcctgagttaaaacataaaattgaattaacgaaaatgtacacgcaggacaaatcaaaatttgtaaaggacgacaactttaaagtggatgaaaaatttataatgaggataattgaaccgataaacggagaagaaatcaaaaaggaaacaaatgagctagacaaaagaaattctactttaaaagctacgtacttgactactccagaggctaatataggctcacaaaagcgcataaagaaattttctgattttactattctgcaagtgatgggtgagggtgcgtacggtaaagtcaatttatgcattcataacagagaacactatatcgtggtcatcaaaatgattttcaaagagaggattttagtagacacatgggtgagagatagaaaattaggtactataccttctgagatccaaattatggcgaccttgaataaaaattcccaagaaaatatcttgaagttattagatttttttgaagatgacgattattattacattgaaacaccggtccatggagaaactggtagtattgatctatttgatgttatcgaattcaaaaaagatatggttgaacatgaagctaaactggtgtttaaacaggtagtcgctagtataaagcatttacatgaccaaggaattgttcatagagacataaaggacgaaaatgttattgttgattctcatggctttgtaaaattaatcgatttcggttcggctgcctatatcaagagtggaccattcgatgtttttgtgggaacaatggactatgctgcacctgaagtccttggtggttcctcttacaaaggtaaaccacaagatatttgggctcttggtgtgctactttataccataatttataaagagaatccttattacaacattgatgaaatcttggaaggtgaattaaggttcgataaatcggaacatgtcagtgaagaatgcatcagtttgataaaaagaattttgacaagagaagttgataaaagacctactattgatgaaatatatgaagataaatggcttaaaatctag

SEQ ID NO: 10046 - DNA, 3306 bp, Artificial Sequence
  Description of Artificial Sequence: Synthetic polynucleotide
atgacatacccggttagtgcagccgctcctgccgacatttcttattctaaaaataccccgttggtagggctctctaaacctccatgcttgtaccaacacgcttcctcctccgtcgattctttttcttctacattcagtgatgatgatcgttccgaccttgttgctgtacctaatgagtctccgcatgcattttcttataatcccatatctccaaactctttgggagtaaggttgaccatcttaagaaggtctttggaaataatggtaaacagtcctgacatcttacatgagttgaagaaaaaagcacccgtaatagcataccccccctcccttagacacacaagaaacttaacagagactgccacgttaagtgcatctagagatccgttaaatgggtctttgatttctccattagtatccaatatgccatctcctgctagtagacccgtgatacagagagcaacgtccttaatggtgttgcctgataatgatactgccagtaaattgaatccagccaagtccgagttagaaaacttgttattcttgttgaatttagcattggaaaacaattccttcgaaagagcttccgatttacacatgctttctttattgaatatcaagaaaataaactttgattctgacattcaaaaaagtgaaactttgaaaaaggttttattagatagtttagcagaaccattttttgaaaactacaagaagttccctcacaaagatttaggttccaaatctcaatataatgaatatgaggagaaacacgatgatatagtctccttagcagacatcaaaccacaacaggactatagcagaattcttcatcctttcacatctgcaaaaaattctggtccagaggccatttttacatgttctcaacaatacccctggaacttcaaagctgccaatgatttggcgtgtttgacgttcggtatatccaagaatgttatcaaggcacttactttattagaccttattcatacggatagcagaaattttgttttggagaaaatcatgaatgcagaagatgataaccaagaaattgtgtttaccggagaaactatacctatcgtccagccaaattctacaagcaataataatgtaccaaatttaatttgggcttctctttgggccaagagaaagaatggcttattggtctgcgtatttgaaaaaacgccttgcgattacattgacgtcatgttaaacttgagagatttttctgtggacagcattattgatacaacacactttttggaaaactttgacaagaaaaagcagcaagaatctacttctccaatgacagaaaagaaaacggtaaaatttgcaaatgaaattcacgatattgggtctgtaagtcactctttgagtaaattgattgatgatgtacgttttggaaaagtgttttctgcagatgatgatttattacccttgtctatcagggtggcaaatcatgtcaacgaagagagatattttacgttgaattgtttgtctgaaaatataccatgtgctgttacaacttccgtattggaaaacgaaataaaattaaaaattcatagtttgccctatcaggctgggttgtttattgttgacagtcacactttaagtcttttaagtttcaacaaatctgtcgccaaaaacatgtttggcttgagacttcacgagttggccggtagttctgttactaagttggttccttctttggcggacatgatatcttatatcaataaaacttatcctatgttaaatatcacattaccagaaaataaaggattggttttaacagaacattttttcagaaaaattgaggctgaaatgcatcatgataaggactctttttacacttctattggtttggacggctgtcacaaagatggtaatttgataaaggtggatgttcaattaagagtcttgaatacgaatgctgtattattatggattacacactccagagacgtggtcattgaaaattataccaccgttccttctcagttaccgatgttaaaggagaacgaaattgatgtcgttggcagtagaggtagttccagtgcatcttccaagaaatcttctgaaaaaattcctgtgaatactttgaaggcaatggctgatttatccattagctccgctgaaacgatttctaatagtgacgatgaagtagacttaaatcaagtgaatgaaaaacttagagaaacttcttgcggtaaagtgagaggtatcgaatctaatgacaacaataactatgacgatgacatgacaatggttgatgatcctgagttaaaacataaaattgaattaacgaaaatgtacacgcaggacaaatctaaatttgtaaaggacgacaactttaaagtggatgaaaaatttataatgaggataattgaaccgataaacggagaagaaatcaaaaaggaaacaaatgagttggacaaaagaaattctactttaaaagctacgtacttgactactccagaggctaatataggctctcaaaagcgcataaagaaattttctgattttactattttacaagtgatgggtgagggtgcgtacggtaaagtcaatttatgcattcataacagagaacactatatcgtggtcatcaaaatgattttcaaagagaggattttagtagacacatgggtgagagatagaaaattaggtactataccttctgagatccaaattatggcgaccttgaataaaaattcccaagaaaatatcttgaagttattagatttttttgaagatgacgattattattacattgaaacaccggtccatggagaaactggtagtattgatttatttgatgttatcgaattcaaaaaagatatggttgaacatgaagctaaattagtgtttaaacaggtagtcgctagtataaagcatttacatgaccaaggaattgttcatagagacataaaggacgaaaatgttattgttgattctcatggctttgtaaaattaatcgatttcggttctgctgcctatatcaagagtggaccattcgatgtttttgtgggaacaatggactatgctgcacctgaagtccttggtggttcctcttacaaaggtaaaccacaagatatttgggctcttggtgtgttgctttataccataatttataaagagaatccttattacaacattgatgaaatcttggaaggtgaattaaggttcgataaaagtgaacatgtcagtgaagaatgcatcagtttgataaaaagaattttgacaagagaagttgataaaagacctactattgatgaaatatatgaagataaatggcttaaaatctga

SEQ ID NO: 10047 - DNA, 1152 bp, Saccharomyces cerevisiae
atggctgcaagtgagataatgaacaatctgcctatgcattccctcgattcttctctaagggatttacttaacgatgacttattcattgaaagtgatgaatcgaccaagtcggtaaatgatcagaggagtgaagtatttcaagaatgtgtgaaccttttcataaaaagagatatcaaggattgcctagaaaaaatgtctgaggttggatttattgatattaccgttttcaagtccaaccctatgatattagatttatttgtcagcgcctgtgatattatgcccagctttaccaaattaggtttaacactgcagagtgagattttgaatattttcacgttagatacccctcaatgtattgagacaagaaaaattattctcggtgacctcagtaaacttttggtcatcaataaattctttcgatgctgtatcaaggttattcagtttaacttaactgatcacaccgaacaagaagaaaaaactctggagcttgaatccataatgagtgatttcattttcgtatacataacgaaaatgaggacaactatagatgtagttggcttacaagaattaatcgagatattcatctttcaggtgaaggtaaaactgcatcataaaaaaccctcaccgaatatgtattgggcgctttgcaaaacattacctaagttatctccaaccctaaagggcctttacttatctaaagatgtttccatagaggatgctattctgaactcaatagataataaaatacaaaaagataaggcgaagtctaaaggtaaacaaagaggagtgaaacagaaaatacaccattttcacgagcctatgttacacaatagtagtgaagaacaggttaaggttgaggatgcgtttaatcaacgcacctctactgatagtagactccagagtactggaacggcgccccgtaaaaaaaacaatgatattactgttctggctggttcattttgggctgtcctgaagcatcatttcacaagaagtgtgctgaacaaaaacggacttctgctcacaggtctgctgctactcttatgtttgaaaaaatataagtcattgatggcaattttcaaacatgttccagcggcctttcacactgtatacccccagattgtagggttgctaaaacttctagcgagtatatga

SEQ ID NO: 10048 - DNA, 1152 bp, Artificial Sequence
  Description of Artificial Sequence: Synthetic polynucleotide
atggctgcaagtgagataatgaacaatttacctatgcattccctcgattcttctttgagggatttacttaacgatgacttattcattgaaagtgatgaaagtaccaagagtgtaaatgatcagaggagtgaagtatttcaagaatgtgtgaaccttttcataaaaagagatatcaaggattgcttagaaaaaatgtctgaggttggatttattgatattaccgttttcaagtccaaccctatgatattagatttatttgtcagcgcctgtgatattatgcccagctttaccaaattaggtttaacattacagagtgagattttgaatattttcacgttagatacccctcaatgtattgagacaagaaaaattattctcggtgacctcagtaaacttttggtcatcaataaattctttagatgctgtatcaaggttattcagtttaacttaactgatcacaccgaacaagaagaaaaaactttagagcttgaatccataatgagtgatttcattttcgtatacataacgaaaatgaggacaactatagatgtagttggcttacaagaattaatcgagatattcatctttcaggtgaaggtaaaattgcatcataaaaaaccctctccgaatatgtattgggcgctttgcaaaacattacctaagttatctccaaccttgaagggcctttacttatctaaagatgtttccatagaggatgctattttgaacagcatagataataaaatacaaaaagataaggcgaagtctaaaggtaaacaaagaggagtgaaacagaaaatacaccattttcacgagcctatgttacacaatagtagtgaagaacaggttaaggttgaggatgcgtttaatcaacgcacctctactgatagtagactccagagtactggaacggcgccccgtaaaaaaaacaatgatattactgttttggctggttctttttgggctgtcttgaagcatcatttcacaagaagtgtgttgaacaaaaacggacttttactcacaggtttattacttctcttatgtttgaaaaaatataagtctttgatggcaattttcaaacatgttccagcggcctttcacactgtatacccccagattgtagggttgttgaaacttttggcgagtatatga

SEQ ID NO: 10049 - DNA, 1143 bp, Saccharomyces cerevisiae
atgagagaggaaagtaggtctaggaagagaaagcatattcctgttgatattgaagaggtagaagttcgatctaagtatttcaaaaagaatgagagaactgttgagttagtaaaagaaaataaaatcaataaagatttgcaaaattacggcggagtaaatattgactggatcaaggcactgaagccaatagagtattttgaatggatcgaatcaaggacttgtgatgatccgagaacttggggacggccaataactaaagaagaaatgattaacgattctggggcgaaagttcctgagagtttcttacccatatataatcgggtgagattaatgaggtccaaggttaaaaccccggtagatgctatgggatgtagcatgattcctgttttagtttctaataaatgtgggatacctagtgaaaaagtcgatccaaagaatttcaggcttcaatttcttattggcactatgctttctgctcaaacgagggacgaaaggatggcgcaagcggctttgaatatcaccgaatactgcttaaacacattaaaaatagcagagggtattacgctagatggactgcttaaaattgatgaacctgtattagcaaatctaattcgatgcgttagcttctataccagaaaagccaatttcatcaaaagaaccgcacaattattggtagacaatttcgattcagatataccgtatgatatagagggaattctctcgttacctggagttggacctaaaatgggatatttaacactgcaaaaaggttgggggctgattgccggcatatgcgtcgatgttcatgtccataggctgtgtaaaatgtggaattgggtagaccctattaagtgtaagactgccgagcatactagaaaggagttacaggtttggctacctcactcactgtggtacgaaataaacaccgttttggttggatttggtcaattgatctgcatggccaggggtaagaggtgtgatttatgtctagcaaacgatgtctgcaatgctcgcaatgagaagctaatcgaatcttccaaatttcatcaattggaggacaaagaagacatcgagaaagtatattcgcattggttggacacggttacaaatggaattacaacagaaagacacaagaaaaaatag

SEQ ID NO: 10050 - DNA, 1143 bp, Artificial Sequence
  Description of Artificial Sequence: Synthetic polynucleotide
atgagagaggaaagtaggtctaggaagagaaagcatattcctgttgatattgaagaggtagaagttagatctaagtatttcaaaaagaatgagagaactgttgagttagtaaaagaaaataaaatcaataaagatttgcaaaattacggcggagtaaatattgactggatcaaggcattgaagccaatagagtattttgaatggatcgaaagtaggacttgtgatgatccgagaacttggggaagaccaataactaaagaagaaatgattaacgattctggggcgaaagttcctgagagtttcttacccatatataatagagtgagattaatgaggtccaaggttaaaaccccggtagatgctatgggatgtagcatgattcctgttttagtttctaataaatgtgggatacctagtgaaaaagtcgatccaaagaatttcaggcttcaatttcttattggcactatgctttctgctcaaacgagggacgaaaggatggcgcaagcggctttgaatatcaccgaatactgcttaaacacattaaaaatagcagagggtattacgttagatggattgcttaaaattgatgaacctgtattagcaaatttaattagatgcgttagcttctataccagaaaagccaatttcatcaaaagaaccgcacaattattggtagacaatttcgattctgatataccgtatgatatagagggaattctctctttacctggagttggacctaaaatgggatatttaacattacaaaaaggttgggggttgattgccggcatatgcgtcgatgttcatgtccataggttatgtaaaatgtggaattgggtagaccctattaagtgtaagactgccgagcatactagaaaggagttacaggtttggttacctcactctctttggtacgaaataaacaccgttttggttggatttggtcaattgatctgcatggccaggggtaagaggtgtgatttatgtttggcaaacgatgtctgcaatgctcgcaatgagaagttaatcgaatcttccaaatttcatcaattggaggacaaagaagacatcgagaaagtatattctcattggttggacacggttacaaatggaattacaacagaaagacacaagaaaaaatga

SEQ ID NO: 10051 - DNA, 1092 bp, Saccharomyces cerevisiae
atgtttactcgaaggtttattccagttgttcagtcaactaagcaaaacatcggtaaatatgtgcgaaaagatgctaggttcactttattaacatacaacatgctctcaccgtcatatatgtggccacaggtatacacatacgttgcagagccatacaaaaactggagttataggcacagactgctggagaaagaacttttgaatactttcaaggctgatattatgtgtctccaagaaatgaccgcaagagattatgaagattattggcacgattccataggggtagatgtcaattatgggtccaaattcatttccaagacacccccaaagtattggaaaaaaccggttaaagatatggacggtgtatctattttctataatcttgcaaaatttgactttatatcgtcatcagggatctacttaaaccagctactgaatgttttcaatcaaagggaactgaaatacttatacaataagaaggtaacattaaccgatggtgcttccaatgttattggtgaagacagcttattggatgttttaaaaggcaagaatcaggtatgcttattcgtatctctaagacataaggagacgggtactatttttgtcgttttaaatactcatttgtattggaaatatgacgaagttaagctaacacaatgcatgattataatgagagagttatcaaagatcattaagcagctcctaccgggagatgtaaaaggccaagaaagggtgaagattttattcactggtgatctaaattctacaagagattcgctagttgttaattttctgcaaggtcagatagttagccatggagaccttaatcttattaacccaatgaggccgtatttggatcgttgtgtctatgacgatataccaaaggattattttgtacatacgtgctattcaggaaaattgaagggcatctttgattacgtatggtaccatgattcagattttttactaactaagatcctaaccggtaatgaagtatcagacgaattgctagcgtctaatcagttgggtttacccaatgaaaaccatcctagtgatcatatacctctactaacagaattcaaaatactgtga

SEQ ID NO: 10052 - DNA, 1092 bp, Artificial Sequence
  Description of Artificial Sequence: Synthetic polynucleotide
atgtttactagaaggtttattccagttgttcagtctactaagcaaaacatcggtaaatatgtgagaaaagatgctaggttcactttattaacatacaacatgctctctccgagctatatgtggccacaggtatacacatacgttgcagagccatacaaaaactggagttataggcacagattattggagaaagaacttttgaatactttcaaggctgatattatgtgtctccaagaaatgaccgcaagagattatgaagattattggcacgattccataggggtagatgtcaattatgggtccaaattcatttccaagacacccccaaagtattggaaaaaaccggttaaagatatggacggtgtatctattttctataatcttgcaaaatttgactttatatcttcttctgggatctacttaaaccagttattgaatgttttcaatcaaagggaattgaaatacttatacaataagaaggtaacattaaccgatggtgcttccaatgttattggtgaagacagcttattggatgttttaaaaggcaagaatcaggtatgcttattcgtatctttgagacataaggagacgggtactatttttgtcgttttaaatactcatttgtattggaaatatgacgaagttaagttaacacaatgcatgattataatgagagagttatccaagatcattaagcagctcttgccgggagatgtaaaaggccaagaaagggtgaagattttattcactggtgatttgaattctacaagagattctttggttgttaattttttgcaaggtcagatagttagccatggagaccttaatcttattaacccaatgaggccgtatttggatcgttgtgtctatgacgatataccaaaggattattttgtacatacgtgctattctggaaaattgaagggcatctttgattacgtatggtaccatgattctgattttttattaactaagatcttgaccggtaatgaagtaagtgacgaattgttagcgtctaatcagttgggtttacccaatgaaaaccatcctagtgatcatatacctttattaacagaattcaaaatattatga

SEQ ID NO: 10053 - DNA, 1380 bp, Saccharomyces cerevisiae
atgtcctctgcaattgacaatctctttggtaacattgatgagaaaaaaatagaatcttcagtagataagctatttagttcatcctgtggacctattaataaattggaagtcaaaagcaaaacacgtactgtccttcctgattcgaagaaaagggaaagagctgccgaagctgatcaagaagaaaaagaagcaagcaaacctgatgtttcagatgagcaaactgaagaagttgcccttccaaaagtaaagaaggccaaaaaaagtaaaaggaatgacgaggatgaagacttagaagcccgctattatgcgaaactactaaatgaagaagctgaggctgaggatgataaaccaacagtaacgaaaactgatgaaacttcagtaccactgacatcagcagctaagaaagttgatttcaaagaagacgagttagaaaaggcagaaagaactgttttcattggtaacatcttaagtactgtcatcacatctaaaaaggtttataaagaattcaaaaaactttttggtacaaatccgatagcagaaactgaggaatctggtaatgaaaaagaagaggaaagttctaagaaaagtgacaataacgaatttgccattgaaagcataagattcagatctatttcctttgatgaagctcttcctagaaaagttgcgtttgtccaacaaaaatttcataagtcaagggatacaataaacgcttacatcgtctataagaataagtctgctgtaagaaaaatctgctcgaatttgaatgctgtcgttttccaagatcatcacttaagagttgattcagttgctcatccagctccgcatgataagaagcgttcaatctttgtaggtaacttggattttgaagaaatagaagaaagtctttggaaacattttgaaccatgtggcgatattgaatatgtccgtattatcagagattcaaagacaaatatgggtaagggatttgcttatgttcaatttaaagatttacaaagtgtaaacaaagcacttttattgaacgaaaagcctatgaagtcacaaaaacaagaagacgaaaatacaaagaaaccaactaaaaaggcaagaaaattgcgtgtttccagatgtaagaacatgaagaagggtactactattgggaccggcttggatagaaatgggttgacagattcacaaagaaccagagcaggtagagctaaaaagattttaggtaaggctgatagagccactttgggccaagagataactatcgaaggtttaagagcaaagaaaggcgaaggttccacccatctaaaaaagaagaaacaaagatccgctacaggtagggttaccaaaagatcgatagcattcaagaaagctcaagctgaaaagagcaagaaatag

SEQ ID NO: 10054 - DNA, 1380 bp, Artificial Sequence
  Description of Artificial Sequence: Synthetic polynucleotide
atgtcctctgcaattgacaatctctttggtaacattgatgagaaaaaaatagaatcttctgtagataagttatttagttcttcctgtggacctattaataaattggaagtcaaaagcaaaacacgtactgtccttcctgattctaagaaaagggaaagagctgccgaagctgatcaagaagaaaaagaagcaagcaaacctgatgtttctgatgagcaaactgaagaagttgcccttccaaaagtaaagaaggccaaaaaaagtaaaaggaatgacgaggatgaagacttagaagcccgctattatgcgaaattattgaatgaagaagctgaggctgaggatgataaaccaacagtaacgaaaactgatgaaacttctgtaccattaacaagtgcagctaagaaagttgatttcaaagaagacgagttagaaaaggcagaaagaactgttttcattggtaacatcttaagtactgtcatcacatctaaaaaggtttataaagaattcaaaaaactttttggtacaaatccgatagcagaaactgaggaatctggtaatgaaaaagaagaggaaagttctaagaaaagtgacaataacgaatttgccattgaaagcataagattcagatctatttcctttgatgaagctcttcctagaaaagttgcgtttgtccaacaaaaatttcataagtccagggatacaataaacgcttacatcgtctataagaataagtctgctgtaagaaaaatctgctccaatttgaatgctgtcgttttccaagatcatcacttaagagttgattctgttgctcatccagctccgcatgataagaagcgttccatctttgtaggtaacttggattttgaagaaatagaagaaagtctttggaaacattttgaaccatgtggcgatattgaatatgtccgtattatcagagattctaagacaaatatgggtaagggatttgcttatgttcaatttaaagatttacaaagtgtaaacaaagcacttttattgaacgaaaagcctatgaagtctcaaaaacaagaagacgaaaatacaaagaaaccaactaaaaaggcaagaaaattgcgtgtttccagatgtaagaacatgaagaagggtactactattgggaccggcttggatagaaatgggttgacagattctcaaagaaccagagcaggtagagctaaaaagattttaggtaaggctgatagagccactttgggccaagagataactatcgaaggtttaagagcaaagaaaggcgaaggttccacccatttgaaaaagaagaaacaaagatccgctacaggtagggttaccaaaagaagtatagcattcaagaaagctcaagctgaaaagagcaagaaatga

SEQ ID NO: 10055 - DNA, 429 bp, Saccharomyces cerevisiae
atgtctcaagctgttaatgccaagaagagagtttttaagacccactcttacagaggtgtcgatttggaaaaattgttggaaatgtccactgaagatttcgtcaagttggccccagctagagttagaagaagatttgcccgtggtatgacttccaagccagccggtttcatgaagaagttgagagctgccaagttggctgccccagaaaatgaaaagccagctccagtcagaacccacatgagaaacatgatcattgttccagaaatgatcggttccgtcgtcggtatctacaacggtaaggctttcaaccaagttgaaatcagaccagaaatgttgggtcactatttgggtgaattctccattacttacaccccagtcagacatggtagagccggtgctactacttcccgtttcatcccattgaaataa

SEQ ID NO: 10056 - DNA, 429 bp, Artificial Sequence
  Description of Artificial Sequence: Synthetic polynucleotide
atgtctcaagctgttaatgccaagaagagagtttttaagacccactcttacagaggtgtcgatttggaaaaattgttggaaatgtccactgaagatttcgtcaagttggccccagctagagttagaagaagatttgcccgtggtatgacttccaagccagccggtttcatgaagaagttgagagctgccaagttggctgccccagaaaatgaaaagccagctccagtcagaacccacatgagaaacatgatcattgttccagaaatgatcggttccgtcgtcggtatctacaacggtaaggctttcaaccaagttgaaatcagaccagaaatgttgggtcactatttgggtgaattctccattacttacaccccagtcagacatggtagagccggtgctactacttcccgtttcatcccattgaaatga

SEQ ID NO: 10057 - DNA, 321 bp, Saccharomyces cerevisiae
atgaagtacttagctgcttacctattattgaacgctgctggtaacaccccagatgccaccaagattaaggctattttggaatccgtcggtatcgaaatcgaagacgaaaaggtttcctccgttttgtccgctttggaaggtaagtctgttgacgaattaattactgaaggtaacgaaaagttggctgctgttccagctgctggtccagcttctgctggcggtgctgctgctgcctctggtgatgctgctgctgaagaagaaaaggaagaagaagccgctgaagaatctgacgacgacatgggtttcggtttattcgactaa

SEQ ID NO: 10058 - DNA, 321 bp, Artificial Sequence
  Description of Artificial Sequence: Synthetic polynucleotide
atgaagtacttagctgcttacttattattgaacgctgctggtaacaccccagatgccaccaagattaaggctattttggaatccgtcggtatcgaaatcgaagacgaaaaggtttcctccgttttgtccgctttggaaggtaagtctgttgacgaattaattactgaaggtaacgaaaagttggctgctgttccagctgctggtccagcttctgctggcggtgctgctgctgcctctggtgatgctgctgctgaagaagaaaaggaagaagaagccgctgaagaatctgacgacgacatgggtttcggtttattcgactga

SEQ ID NO: 10059 - DNA, 96 bp, Saccharomyces cerevisiae
atgaaatacatggggtccttcctgaggaaagcggctacaacaaatttattcaatagcataaaaaaaaggaaggtacaaaacagagccatgtcatag

SEQ ID NO: 10060 - DNA, 96 bp, Artificial Sequence
  Description of Artificial Sequence: Synthetic oligonucleotide
atgaaatacatggggtccttcttgaggaaagcggctacaacaaatttattcaatagcataaaaaaaaggaaggtacaaaacagagccatgtcctga

SEQ ID NO: 10061 - DNA, 765 bp, Saccharomyces cerevisiae
atgagtggttacgatagagctttgtccattttctccccagatggacacattttccaagtggagtacgccctggaggcggtaaagaggggtacctgtgctgtaggtgtcaagggtaagaattgtgtagtattgggctgcgaaagaaggtctactttgaagctgcaagacactagaattacgccttccaaagtttccaaaattgactcgcatgtggtgttgtcattttctggtttaaatgcagattccagaattcttatcgagaaggctagagtggaggcccaaagtcacagactaacgttggaggatcccgtgacggtggagtatctcacacgttatgtcgctggtgtgcaacaaaggtacacgcagtcaggaggtgttagaccatttggtgtgtcgacgctgattgccggcttcgacccgagagatgatgaacccaagctttaccagaccgagccaagtggtatatactcttcgtggtccgctcagaccattgggagaaactccaagacggtacgtgagtttttggagaagaattacgatcgcaaagaaccaccagccacagtggaagaatgtgtcaaacttactgtaagatctctgttggaggtagttcaaacaggtgcaaaaaatattgaaatcactgttgttaagccggactcagatattgttgcgttgagcagtgaggaaattaaccagtacgtcacccaaatcgaacaagaaaagcaagagcagcaagagcaggacaaaaagaaaaaatctaaccattaa

SEQ ID NO: 10062 - DNA, 765 bp, Artificial Sequence
  Description of Artificial Sequence: Synthetic polynucleotide
atgagtggttacgatagagctttgtccattttctccccagatggacacattttccaagtggagtacgccttagaggcggtaaagaggggtacctgtgctgtaggtgtcaagggtaagaattgtgtagtattgggctgcgaaagaaggtctactttgaagttacaagacactagaattacgccttccaaagtttccaaaattgactctcatgtggtgttgagtttttctggtttaaatgcagattccagaattcttatcgagaaggctagagtggaggcccaaagtcacagattgacgttggaggatcccgtgacggtggagtatctcacacgttatgtcgctggtgtgcaacaaaggtacacgcagtccggaggtgttagaccatttggtgtgagtacgttgattgccggcttcgacccgagagatgatgaacccaagctttaccagaccgagccaagtggtatatactcttcttggtccgctcagaccattgggagaaactccaagacggtacgtgagtttttggagaagaattacgatcgcaaagaaccaccagccacagtggaagaatgtgtcaaacttactgtaagatctttgttggaggtagttcaaacaggtgcaaaaaatattgaaatcactgttgttaagccggacagtgatattgttgcgttgagcagtgaggaaattaaccagtacgtcacccaaatcgaacaagaaaagcaagagcagcaagagcaggacaaaaagaaaaaatctaaccattga

SEQ ID NO: 10063 - DNA, 2286 bp, Saccharomyces cerevisiae
atggaacaccaagatagttcgccacctagattcaggaactctggctctaatagagtcactgtgtataacggtactaccctgcctacgatgcccaagagcgccacaccaacatcgagctcaacaacagttactacgcatttgcaaaatattaaggaggaggaaacaaacgatgacgaactcacccaagtggatcgttcatctcctcgtgttttggggaggatctcctctacgtcctcatcttcatccaatattgatttgcgcgataacttggacatgttacacgaaatagaaaaatcaaatactaatatttctttatcagctcctaatttgcatgaggaactgggcgttctcagcgataaaggtaacagtaaagaagaattggctttgttaccacctttacctcacacaggagaaatggaaatcactccacaatttgatatcaacgaggctatttttgaacgagatgacatcagccactcttcaaggctagaaccagatgacgtgttaacaaagttagcgaactctactcgagatgctacgggtgaagatcaggggtttgttgtcatgactcatggccacgatgcgtcgacaaacgacgattcgcaattaagcgctactattcttgacaatcagacgtcatttgatctttctaaagctctagagatgactagccattcaaatatttctaatattattaatagttccggttctgagggaagacgttcaaggacaccggtaagcaattccactctgaaaccaaatttatcatctcctgaaagcgcagaacgtgaagcaaacacgacttcgtcctcctctacgtcggatcacggggcaacaatgcaatatgatcccaagaaaataataactccaattcctgttttaccttcctctgtccgtgaacagcaacagaacaatgcacctttgagagaaagaagcagatctaattctagtgcactggcatctacactgagagatacgatcatttcaggactgcctcaaaatattaattctgtagaaagaaagttatcaaggaagagtaacaggagtaggaagaatacggtgacttttgaagatcgtcttcagaaattgccacccttaagcacccaaatttcgaaccagtacgccaaggtagcaccagctgagaacaatatcgccttacactttcataacttacctacaccagtatcaaacactcaaacgcctgttacgtttcagtctgaatccggactgacagggggagaaaagaaaatgccttttttgagaagagcatctagtgccctattaagaaagacatctgccaaaaattgctccaatttaaccagaacaaatacacctactttatcgacatcctcaacatttgagtcagatctaaatgctcggcagcccatgctaattcgacgatcttccactattgataataaactacctaggaggcagctttcgtgctcgaagctttattcgcgcctcaattcggacagcaagtttgcgaatagcagtcgagcttcggaggaggtcttagtgtccactccaaatgacacagaacacgtctacagaaagacatctctaggttctaagataaagagaggttttactagaatattgagcgacagtaataatagtaaggaaattctcactttatcacccaaatctatggtgactacggggcctacagaattgtcgttttcctctttatcaaccgtgggaggacatccgacaacgccagtctcaaaagaaaatgatcgagtttcaatagatggcgtgagtacatttaatcgagcatcaacatctcttccagaatcatcaacagacgacatctctccactacgcgaagaaggtaagattaatgttcctaaaagaacgtcaagtagaaagatactgtctaaaaattcaagcaaaaaaaatgtactgcctgaacagcaaacaaagccaagtgaaatatatctggataaagaagccttacaaagttttgttcccgtactctctgtcacagagggtactcatcgcatcaatcgctcgtcgttacaaacgcaatctaccatcggattatgcattaccaatttaagaaacaaagaaggcatgaagctcaatgccaaggaatacgtggaaatcctggctcagcagcaacgcaaggaagatgaaaggtatgctgttttggaaagaaaatttgcatcttgtagatggtgcagtgataaggacctgcagtatttgaaaaagaaacgaatttccatgaataagatatggtctgattatgtccgattttaccgtggaaagttgaacaacccatga

SEQ ID NO: 10064 - DNA, 2286 bp, Artificial Sequence
  Description of Artificial Sequence: Synthetic polynucleotide
atggaacaccaagatagttctccacctagattcaggaactctggctctaatagagtcactgtgtataacggtactaccttacctacgatgcccaagagcgccacaccaacatctagctctacaacagttactacgcatttgcaaaatattaaggaggaggaaacaaacgatgacgaactcacccaagtggatcgttcttctcctcgtgttttggggaggatctcctctacgtcctcttcttcttccaatattgatttgcgcgataacttggacatgttacacgaaatagaaaaatctaatactaatatttctttatctgctcctaatttgcatgaggaattaggcgttctcagcgataaaggtaacagtaaagaagaattggctttgttaccacctttacctcacacaggagaaatggaaatcactccacaatttgatatcaacgaggctatttttgaaagagatgacatcagccactcttccaggttagaaccagatgacgtgttaacaaagttagcgaactctactagagatgctacgggtgaagatcaggggtttgttgtcatgactcatggccacgatgcgtctacaaacgacgattctcaattaagcgctactattcttgacaatcagacgtcttttgatctttctaaagctttggagatgactagccattctaatatttctaatattattaatagttccggttctgagggaagacgttctaggacaccggtaagcaattccactttgaaaccaaatttatcttctcctgaaagcgcagaacgtgaagcaaacacgacttcttcctcctctacgtctgatcacggggcaacaatgcaatatgatcccaagaaaataataactccaattcctgttttaccttcctctgtccgtgaacagcaacagaacaatgcacctttgagagaaagaagcagatctaattctagtgcattggcatctacattaagagatacgatcatttctggattgcctcaaaatattaattctgtagaaagaaagttatctaggaagagtaacaggagtaggaagaatacggtgacttttgaagatcgtcttcagaaattgccacccttaagcacccaaatttccaaccagtacgccaaggtagcaccagctgagaacaatatcgccttacactttcataacttacctacaccagtatccaacactcaaacgcctgttacgtttcagtctgaatccggattaacagggggagaaaagaaaatgccttttttgagaagagcatctagtgccttattaagaaagacatctgccaaaaattgctccaatttaaccagaacaaatacacctactttatctacatcctctacatttgagtctgatttgaatgctagacagcccatgttgattagaagatcttccactattgataataaattacctaggaggcagctttcttgctctaagctttattctcgcctcaatagtgacagcaagtttgcgaatagcagtagagcttctgaggaggtcttagtgtccactccaaatgacacagaacacgtctacagaaagacatctttgggttctaagataaagagaggttttactagaatattgagcgacagtaataatagtaaggaaattctcactttatctcccaaatctatggtgactacggggcctacagaattgagtttttcctctttatctaccgtgggaggacatccgacaacgccagtctccaaagaaaatgatagagtttctatagatggcgtgagtacatttaatagagcaagcacatctcttccagaatcttctacagacgacatctctccattgcgcgaagaaggtaagattaatgttcctaaaagaacgtccagtagaaagatattatctaaaaatagtagcaaaaaaaatgtattacctgaacagcaaacaaagccaagtgaaatatatttggataaagaagccttacaaagttttgttcccgtactctctgtcacagagggtactcatcgcatcaatcgcagctctttacaaacgcaatctaccatcggattatgcattaccaatttaagaaacaaagaaggcatgaagctcaatgccaaggaatacgtggaaatcttggctcagcagcaacgcaaggaagatgaaaggtatgctgttttggaaagaaaatttgcatcttgtagatggtgcagtgataaggacttacagtatttgaaaaagaaaagaatttccatgaataagatatggtctgattatgtcagattttaccgtggaaagttgaacaacccatga

SEQ ID NO: 10065 - DNA, 3282 bp, Saccharomyces cerevisiae
atgaccagtctaatagatttgggcagatatgttgaaagaacgcatcatggagaagatacagagccaagatcgaaaagggtaaaaatcgcaaaacctgacttgtcttccttccaaccaggcagcattattaagatccgtttacaggattttgttacttacactttaaccgaattcaatctttcaccgtctttaaatatgatcattgggccaaacggatctggaaaatctactttcgtatgcgcagtgtgtttaggattggctggtaaacccgagtatattggtaggagtaaaaaagtggaagatttcatcaaaaatggtcaagatgtttcaaaaattgaaatcaccttgaaaaattcaccaaatgttactgatattgaatacatagacgcacgtgatgaaacaataaagattaccaggattattacgagatccaagaggagatcggattatctaataaatgactaccaggtatctgagagtgtagttaaaactttagttgctcagctgaacattcagttggataatctttgtcaatttttatctcaagagcgtgttgaggagtttgctcgcttgaagtcagttaaattattagtagagactataaggtcaatcgatgcaagcttattggatgtgttggatgaactaagggaattacaaggaaatgagcaaagcttgcaaaaagatctcgattttaaaaaagctaaaattgttcatttgagacaagaaagtgataaactacgtaaatcagttgaatctttacgagattttcaaaataagaagggtgaaatcgagttacactcccaactattaccttatgtgaaagtaaaggaccataaagaaaagctaaacatatataaagaagaatacgaacgagcgaaagcgaacttaagggctatactgaaggataaaaaaccatttgcaaatactaagaagactttggaaaatcaggtggaagagttaacagagaagtgttccctaaaaactgatgagttcctgaaagcaaaagaaaagatcaacgaaatcttcgaaaaattaaatactattagggatgaggtcatcaaaaagaaaaaccagaacgaatattatagaggaagaaccaaaaaactacaggccaccattattagtacaaaggaagattttctaaggagtcaggaaatattagcacaaacacatcttcctgagaaaagcgtatttgaagatatagacattaaaagaaaggaaattattaataaagaaggcgaaattagggatcttatttccgaaattgatgcgaaggcgaacgctattaatcatgagatgagaagcatacagagacaagctgaaagcaagaccaaatcccttacaacaactgataaaatcggtatcttaaatcaggaccaggatttaaaggaggtccgtgatgctgtgttgatggttagagagcatccagaaatgaaagataaaattctagaaccgccaataatgaccgtgtctgccattaacgctcaatttgctgcatatttagcacaatgtgtggattataatacgagtaaagccttgactgttgttgattctgattcttacaagctatttgcaaatccaattcttgacaaattcaaggttaatttgagagaactctccagtgcagacaccacccctcctgtaccagcggaaacggtgagggacctgggatttgagggttatctatccgattttattaccggtgataagagggttatgaaaatgctttgtcaaactagcaaaattcatactataccggtatcaagaagggaattgacgcctgctcagataaagaagttgattacaccaagaccgaatgggaaaattctttttaaaaggattattcatgggaataggttagtcgatatcaagcaatcagcatatggtagtaagcaggtctttcctactgacgttagtattaaacaaactaatttttatcagggatcaatcatgtcaaatgagcagaaaattagaattgaaaatgaaattatcaacttaaagaatgaatacaacgatcgaaaatctacgttagatgcattgtcaaaccagaaaagtggttataggcacgaattatctgagttggcgtcaaaaaacgacgatattaatagggaagctcatcaattaaatgagattcgcaagaagtacactatgagaaaaagtacaatagagactttaagagagaaattagatcaactgaaacgtgaagctagaaaggacgtatctcaaaagattaaagatattgatgatcagatccaacaactattactcaagcaaagacatttgctgtctaaaatggcctcttcaatgaagagtttaaagaattgtcagaaggagttaataagtactcaaatccttcaatttgaagcccaaaatatggatgtttctatgaatgacgtaattggttttttcaatgagagggaagctgatttgaagagccaatatgaagacaagaaaaagttcgtaaaagaaatgagagacactcctgaatttcaatcatggatgagagaaatcaggtcttatgaccaagacactaaggaaaaattgaataaagtggcagaaaaatacgaggaggaagggaatttcaatctgtcattcgttcaggatgttctcgataaattagaatcggagatagctatggtaaaccacgacgagtcagccgtaacaattttggatcaagtcacagccgaactgagagagttggagcacacggttcctcagcagtcgaaagacttggagaccattaaagctaaattaaaagaagatcacgcagttttggagcccaaattagatgatattgtatcaaaaatctctgcaagatttgcgcgcttattcaacaatgttgggagtgctggtgcggttcgtctagaaaagccgaaggactatgctgaatggaagatagaaatcatggtaaaattcagagataatgcacctttaaaaaagttagattcccacacgcaatcaggtggtgaaagagctgtttctacagttctttacatgattgctttgcaagagtttacctctgcaccatttagagtggttgatgaaatcaatcaaggtatggactctagaaatgaaaggatcgttcataaagctatggtggagaacgcgtgtgccgaaaacacttctcaatattttttaatcactccaaaattattgactggcttgcattatcatgaaaagatgagaatacactgtgtcatggctggttcttggattccaaacccttctgaggatccgaagatgatacatttcggtgaaacttctaactactcattcgattaa

SEQ ID NO: 10066 - DNA, 3282 bp, Artificial Sequence
  Description of Artificial Sequence: Synthetic polynucleotide
atgaccagtttgatagatttgggcagatatgttgaaagaacgcatcatggagaagatacagagccaagaagtaaaagggtaaaaatcgcaaaacctgacttgtcttccttccaaccaggcagcattattaagatccgtttacaggattttgttacttacactttaaccgaattcaatctttctccgtctttaaatatgatcattgggccaaacggatctggaaaatctactttcgtatgcgcagtgtgtttaggattggctggtaaacccgagtatattggtaggagtaaaaaagtggaagatttcatcaaaaatggtcaagatgtttccaaaattgaaatcaccttgaaaaattctccaaatgttactgatattgaatacatagacgcacgtgatgaaacaataaagattaccaggattattacgagatccaagaggagaagtgattatttgataaatgactaccaggtatctgagagtgtagttaaaactttagttgctcagttgaacattcagttggataatctttgtcaatttttatctcaagagcgtgttgaggagtttgctcgcttgaagtctgttaaattattagtagagactataaggtctatcgatgcaagcttattggatgtgttggatgaattgagggaattacaaggaaatgagcaaagcttgcaaaaagatctcgattttaaaaaagctaaaattgttcatttgagacaagaaagtgataaattacgtaaatctgttgaatctttaagagattttcaaaataagaagggtgaaatcgagttacactcccaattattaccttatgtgaaagtaaaggaccataaagaaaagttgaacatatataaagaagaatacgaaagagcgaaagcgaacttaagggctatattgaaggataaaaaaccatttgcaaatactaagaagactttggaaaatcaggtggaagagttaacagagaagtgttccttgaaaactgatgagttcttgaaagcaaaagaaaagatcaacgaaatcttcgaaaaattaaatactattagggatgaggtcatcaaaaagaaaaaccagaacgaatattatagaggaagaaccaaaaaattacaggccaccattattagtacaaaggaagattttttaaggagtcaggaaatattagcacaaacacatcttcctgagaaaagcgtatttgaagatatagacattaaaagaaaggaaattattaataaagaaggcgaaattagggatcttatttccgaaattgatgcgaaggcgaacgctattaatcatgagatgagaagcatacagagacaagctgaaagcaagaccaaatcccttacaacaactgataaaatcggtatcttaaatcaggaccaggatttaaaggaggtccgtgatgctgtgttgatggttagagagcatccagaaatgaaagataaaattttggaaccgccaataatgaccgtgtctgccattaacgctcaatttgctgcatatttagcacaatgtgtggattataatacgagtaaagccttgactgttgttgattctgattcttacaagttatttgcaaatccaattcttgacaaattcaaggttaatttgagagaactctccagtgcagacaccacccctcctgtaccagcggaaacggtgagggacttgggatttgagggttatttatccgattttattaccggtgataagagggttatgaaaatgctttgtcaaactagcaaaattcatactataccggtatctagaagggaattgacgcctgctcagataaagaagttgattacaccaagaccgaatgggaaaattctttttaaaaggattattcatgggaataggttagtcgatatcaagcaaagtgcatatggtagtaagcaggtctttcctactgacgttagtattaaacaaactaatttttatcagggatctatcatgagtaatgagcagaaaattagaattgaaaatgaaattatcaacttaaagaatgaatacaacgataggaaatctacgttagatgcattgtctaaccagaaaagtggttataggcacgaattatctgagttggcgtccaaaaacgacgatattaatagggaagctcatcaattaaatgagattcgcaagaagtacactatgagaaaaagtacaatagagactttaagagagaaattagatcaattgaaacgtgaagctagaaaggacgtatctcaaaagattaaagatattgatgatcagatccaacaattattactcaagcaaagacatttgttatctaaaatggcctcttctatgaagagtttaaagaattgtcagaaggagttaataagtactcaaatccttcaatttgaagcccaaaatatggatgtttctatgaatgacgtaattggttttttcaatgagagggaagctgatttgaagagccaatatgaagacaagaaaaagttcgtaaaagaaatgagagacactcctgaatttcaaagttggatgagagaaatcaggtcttatgaccaagacactaaggaaaaattgaataaagtggcagaaaaatacgaggaggaagggaatttcaatttatctttcgttcaggatgttctcgataaattagaaagtgagatagctatggtaaaccacgacgagtctgccgtaacaattttggatcaagtcacagccgaattgagagagttggagcacacggttcctcagcagtccaaagacttggagaccattaaagctaaattaaaagaagatcacgcagttttggagcccaaattagatgatattgtatccaaaatctctgcaagatttgcgcgcttattcaacaatgttgggagtgctggtgcggttcgtttagaaaagccgaaggactatgctgaatggaagatagaaatcatggtaaaattcagagataatgcacctttaaaaaagttagattcccacacgcaatctggtggtgaaagagctgtttctacagttctttacatgattgctttgcaagagtttacctctgcaccatttagagtggttgatgaaatcaatcaaggtatggactctagaaatgaaaggatcgttcataaagctatggtggagaacgcgtgtgccgaaaacacttctcaatattttttaatcactccaaaattattgactggcttgcattatcatgaaaagatgagaatacactgtgtcatggctggttcttggattccaaacccttctgaggatccgaagatgatacatttcggtgaaacttctaactactctttcgattga

SEQ ID NO: 10067 - DNA, 1611 bp, Saccharomyces cerevisiae
atgatcatgttgagaataccgacacggtcttattgttcaccttcgaagctaataaagggcgtaggtctctcaccattgaagaaatctctgttatccaagaaaataaaggaagatatccatccttctttacctgttagaactaggtttgcgccttctccaactgggtttttacacttggggtcactgagaacagccctttacaattacctattagcaagaaacaccaatgggcagtttttgcttcgtttagaagatacagaccagaagaggctaatagagggagcagaagaaaacatctacgagattctgaaatggtgtaacataaactacgatgaaacccctataaagcaaagtgaaaggaaactaatatatgacaaatatgtaaaaatattactatcttctgggaaggcgtatagatgtttttgttcaaaggagcgattgaacgatttgagacactctgcaatggaattgaaacctccttcgatggcaagctatgatcgatgttgtgcacacttaggggaggaagaaataaaatctaagctagcgcaaggtatacctttcactgtgcggtttaaatcgccagaacgatatccaacgtttactgatcttttacatggacaaataaatcttcaaccgcaagtaaactttaacgataaacggtacgatgaccttatccttgttaagtcggataagttgccaacctatcatctggcaaatgttgtggatgaccatttgatgggaataacccatgttataagaggtgaggaatggctgccctctactcctaaacatatcgccctatataatgcatttgggtgggcttgcccaaagttcatccacattcccttattgacgacggttggtgataagaaattgagtaaaagaaaaggtgatatgtctatctcggatttaaaaagacagggagttttgccagaagctttgattaacttttgtgcgctatttggctggtctcctccaagagatctggcttcgaaaaagcatgagtgtttttcaatggaggaattggaaaccatttttaatttgaatggtttgacgaagggaaatgccaaagtcgatgataaaaaattgtggttcttcaataagcattttttgcaaaaaagaatacttaatccttctacattgagggagcttgtcgacgacattatgccttctttagagtccatatataacacatctaccataagccgtgagaaagtagctaaaattttactgaactgtggtggttctctatcaaggattaacgattttcatgatgaattttattatttttttgaaaagcccaaatataatgataatgatgctgtcacgaaatttctaagcaagaacgaaagccgccacattgctcacttattgaagaagcttggacagtttcaagagggcaccgatgctcaagaagtcgaatctatggtcgaaacgatgtattatgagaacggtttttctaggaaagtcacgtatcaggcaatgagatttgctcttgcgggatgtcacccaggtgccaaaatagcagccatgatagatattttgggcatcaaggaaagtaacaaaagattatccgaaggtttacagttcttgcaaagagagaaaaagtaa

SEQ ID NO: 10068 - DNA, 1611 bp, Artificial Sequence
  Description of Artificial Sequence: Synthetic polynucleotide
atgatcatgttgagaataccgacaagatcttattgttctccttctaagttaataaagggcgtaggtctctctccattgaagaaatctttattatccaagaaaataaaggaagatatccatccttctttacctgttagaactaggtttgcgccttctccaactgggtttttacacttggggtctttgagaacagccctttacaattacttattagcaagaaacaccaatgggcagtttttgcttcgtttagaagatacagaccagaagaggttgatagagggagcagaagaaaacatctacgagattttgaaatggtgtaacataaactacgatgaaacccctataaagcaaagtgaaaggaaattgatatatgacaaatatgtaaaaatattattatcttctgggaaggcgtatagatgtttttgttccaaggagagattgaacgatttgagacactctgcaatggaattgaaacctccttctatggcaagctatgatagatgttgtgcacacttaggggaggaagaaataaaatctaagttggcgcaaggtatacctttcactgtgagatttaaatctccagaaagatatccaacgtttactgatcttttacatggacaaataaatcttcaaccgcaagtaaactttaacgataaaagatacgatgaccttatccttgttaagagtgataagttgccaacctatcatttagcaaatgttgtggatgaccatttgatgggaataacccatgttataagaggtgaggaatggttgccctctactcctaaacatatcgccttatataatgcatttgggtgggcttgcccaaagttcatccacattcccttattgacgacggttggtgataagaaattgagtaaaagaaaaggtgatatgtctatcagtgatttaaaaagacagggagttttgccagaagctttgattaacttttgtgcgttatttggctggtctcctccaagagatttggcttccaaaaagcatgagtgtttttccatggaggaattggaaaccatttttaatttgaatggtttgacgaagggaaatgccaaagtcgatgataaaaaattgtggttcttcaataagcattttttgcaaaaaagaatacttaatccttctacattgagggagcttgtcgacgacattatgccttctttagagtccatatataacacatctaccataagccgtgagaaagtagctaaaattttattaaactgtggtggttctttatctaggattaacgattttcatgatgaattttattatttttttgaaaagcccaaatataatgataatgatgctgtcacgaaatttttgagcaagaacgaaagccgccacattgctcacttattgaagaagcttggacagtttcaagagggcaccgatgctcaagaagtcgaatctatggtcgaaacgatgtattatgagaacggtttttctaggaaagtcacgtatcaggcaatgagatttgctcttgcgggatgtcacccaggtgccaaaatagcagccatgatagatattttgggcatcaaggaaagtaacaaaagattatccgaaggtttacagttcttgcaaagagagaaaaagtga

SEQ ID NO: 10069 - DNA, 741 bp, Saccharomyces cerevisiae
atgtttgctgcaattgcctcaggaaatccattgcaactatcggtagaagtccccaattcaaatgggttacagcatacaattgtcctttctcgaacgaaaccgaaactatactcgcatataacactgtttatattacctaatgttacctttcctcaggattatatagctacagtctatttcaaacttagccctcaggaagaatttaaactatttgggtacctaagcagtgagaaacccagtgccatattcaaagtgcaaataccgagctcgaagaaagacgctggagatacaagtgatggattaggtgagatagacatggatgtagatgatggttcgggggccgctgatccgtttactgacaccaatggaagtagcagtaataacatatcagaattgattattggtatttccattgagcctcgagaacaaggaatgatgaaattagaagagtggaaggccagcatgaatgccgaagcacaaaagaacaactcattgatcttgtcaagacctaacttaggaataattcgaaatattaccacggcagggcagttggcacaagtttacccttcattgacacaagaattggccgccaaaatcgttcagcatgcatataactatttatcagggttcctagatgctcagggaaacgtgcccatcaagaggtttgatacatggtgggacaaatttagaaatagactggccaacgacgggacgtttttggatgaagtaactaaaaattag

SEQ ID NO: 10070 - DNA, 741 bp, Artificial Sequence
  Description of Artificial Sequence: Synthetic polynucleotide
atgtttgctgcaattgccagtggaaatccattgcaattaagtgtagaagtccccaatagtaatgggttacagcatacaattgtcctttctaggacgaaaccgaaactttactctcatataacattatttatattacctaatgttacctttcctcaggattatatagctacagtctatttcaaacttagccctcaggaagaatttaaattatttgggtacttgagcagtgagaaacccagtgccatattcaaagtgcaaataccgagctctaagaaagacgctggagatacaagtgatggattaggtgagatagacatggatgtagatgatggttctggggccgctgatccgtttactgacaccaatggaagtagcagtaataacatatctgaattgattattggtatttccattgagcctagagaacaaggaatgatgaaattagaagagtggaaggccagcatgaatgccgaagcacaaaagaacaactctttgatcttgtccagacctaacttaggaataattagaaatattaccacggcagggcagttggcacaagtttacccttctttgacacaagaattggccgccaaaatcgttcagcatgcatataactatttaagtgggttcttggatgctcagggaaacgtgcccatcaagaggtttgatacatggtgggacaaatttagaaatagattggccaacgacgggacgtttttggatgaagtaactaaaaattga

SEQ ID NO: 10071 - DNA, 1266 bp, Saccharomyces cerevisiae
atggtccggattcttcccataattttgagcgccctatcttcgaaattagtggcgagtacaatattgcattcatccatacactcagtgccatctggaggcgaaatcatatctgcagaagatcttaaagaacttgaaatttcagggaattcgatctgcgttgataatcgttgctatcctaagatatttgaaccaagacacgattggcagcccatactgccaggtcaagaactccccggtggtttggacattagaataaacatggacacaggtttaaaagaggcaaaactaaatgatgagaagaatgtcggtgataatggtagccatgagttaattgtatcttcagaagacatgaaagcatcgcctggtgactatgaattttccagtgatttcaaagaaatgagaaacatcatagattctaacccgactttatcttcacaggacattgccagattggaggatagttttgatagaataatggaatttgcgcatgattacaagcacggctacaaaattattacccatgaattcgccctcttggccaaccttagtctcaatgaaaatttgccgttaacattgagagagctcagtactagagtcattaccagctgcttgagaaacaatcctcctgtagtcgagttcattaatgaaagttttccaaattttaaaagcaaaatcatggccgctctgtcaaatttgaatgattctaaccacagatcctctaatatcctaataaaaagatacttgtccattttaaacgaattacctgtcacatccgaagatcttcctatatactctacggttgttttacaaaatgtatatgaaagaaacaacaaggacaaacagttacaaataaaagtcctggagttgatcagcaaaattttgaaggccgacatgtacgaaaatgacgatacaaatctaattttgttcaaaagaaatgctgagaattggtcgtcaaatctgcaagagtgggcaaacgagttccaagagatggtccagaacaaaagtatagatgaactacatacaagaacgttttttgacaccctttacaacttgaagaaaattttcaaaagtgacatcacgatcaacaaagggtttttgaattggttagcgcaacaatgtaaagccaggcaatctaacttggacaatgggctccaagagagagatactgaacaagactcatttgataagaaacttatcgacagcagacacttgatctttggcaaccccatggctcatagaataaaaaatttcagagatgaactctga

SEQ ID NO: 10072 - DNA, 1266 bp, Artificial Sequence
  Description of Artificial Sequence: Synthetic polynucleotide
atggtcagaattcttcccataattttgagcgccttatcttctaaattagtggcgagtacaatattgcattcttccatacactctgtgccatctggaggcgaaatcatatctgcagaagatcttaaagaacttgaaatttctgggaattccatctgcgttgataatcgttgctatcctaagatatttgaaccaagacacgattggcagcccatattgccaggtcaagaactccccggtggtttggacattagaataaacatggacacaggtttaaaagaggcaaaattgaatgatgagaagaatgtcggtgataatggtagccatgagttaattgtatcttctgaagacatgaaagcatctcctggtgactatgaattttccagtgatttcaaagaaatgagaaacatcatagattctaacccgactttatcttctcaggacattgccagattggaggatagttttgatagaataatggaatttgcgcatgattacaagcacggctacaaaattattacccatgaattcgccctcttggccaaccttagtctcaatgaaaatttgccgttaacattgagagagctcagtactagagtcattaccagctgcttgagaaacaatcctcctgtagtcgagttcattaatgaaagttttccaaattttaaaagcaaaatcatggccgctttatccaatttgaatgattctaaccacagatcctctaatatcttaataaaaagatacttgtccattttaaacgaattacctgtcacatccgaagatcttcctatatactctacggttgttttacaaaatgtatatgaaagaaacaacaaggacaaacagttacaaataaaagtcttggagttgatcagcaaaattttgaaggccgacatgtacgaaaatgacgatacaaatttaattttgttcaaaagaaatgctgagaattggtcttccaatttacaagagtgggcaaacgagttccaagagatggtccagaacaaaagtatagatgaattacatacaagaacgttttttgacaccctttacaacttgaagaaaattttcaaaagtgacatcacgatcaacaaagggtttttgaattggttagcgcaacaatgtaaagccaggcaatctaacttggacaatgggctccaagagagagatactgaacaagactcttttgataagaaacttatcgacagcagacacttgatctttggcaaccccatggctcatagaataaaaaatttcagagatgaactctga

SEQ ID NO: 10073 - DNA, 1455 bp, Saccharomyces cerevisiae
atgttactacgttctcttacaagtgccttcgttttaagtgctggtttggctcaggctgctagcagcagtaacagttccacaccatccattgaaattaaaggcaatgcattttttaattcggaatcaggtgaaaggttttatatccgtggtgttgattaccagcctggtggttcttctaacttgactgatcccttagcagacgcatctgtctgtgacagagacgtccccgttctgaaagatctagggataaatactgtcagagtttatactgtggataactcgcaagatcattcccattgtatgaaactattgcaggagaacggtatatacttgatcctggatgtcaatacccccacgagtgctatttctcgttacgatccagcctgctcctataacgctgactacttacaaaatgtctttgccaccattgatacctttgctgattacgacaatgttctaggttttttcgctggtaacgaggtcatcaatagtgttaatactaccaacactgctacttatgtcaaggcagtggtcagggacatgaagaaatacatcaaggctagaaaatacagacaaattccggtaggttactcggctgctgatatcgtcgctaacagacaattggctgctgaatactttaactgtggtgatgaagctgacgctagaatcgacatgtttggtgttaatgactattcttggtgtggtgaatcttcatttgtggtatcgggttattccaccaagatgaagctatatcaagattactccgttcctgtcttcttaagtgaatttggttgtaaccaagtcaagagctctcgtccattcacagaaattgaagctatctattccactcaaatgtcttctgtattctccggtgggctagtctacgaatattccaatgaaactaacaattacgggctcgttcaaattgatggtgacaaggtcactaaattgacagattttgaaaacttgaaaaatgaatacagcaaagtatccaacccagaaggcaatggtggttacagtacttccaacaactattctacatgtcctgattatgaaaagggtgtctgggaagctaataacactttgcctgctatgccaagtgctgcttctgcttacttcacatctggagcaggttctcctatgggaaccggaatcgccacccaacaaagttgtgatgctaaggacgatgacgacgaagaagacgacgacacctcctcttcatcctcttcttcctcttcatcttcatcttccgcttcttcatcttctgaatcatcatcctcgacttcaaaggcatcttcctcctccccttctgctagcgaaacgagcttgctaaaatctgccgcatctgctacttcgtccagccaatcgtcctcgaaatcaaagggtgctgccggaattattgagattcctttgatattccgtgctttggcagaactttataacttggttttatga

SEQ ID NO: 10074 - DNA, 1455 bp, Artificial Sequence
  Description of Artificial Sequence: Synthetic polynucleotide
atgttattacgttctcttacaagtgccttcgttttaagtgctggtttggctcaggctgctagcagcagtaacagttccacaccatccattgaaattaaaggcaatgcattttttaattctgaaagtggtgaaaggttttatatccgtggtgttgattaccagcctggtggttcttctaacttgactgatcccttagcagacgcatctgtctgtgacagagacgtccccgttttgaaagatttagggataaatactgtcagagtttatactgtggataactctcaagatcattcccattgtatgaaacttttgcaggagaacggtatatacttgatcttagatgtcaatacccccacgagtgctatttctcgttacgatccagcctgctcctataacgctgactacttacaaaatgtctttgccaccattgatacctttgctgattacgacaatgttttaggttttttcgctggtaacgaggtcatcaatagtgttaatactaccaacactgctacttatgtcaaggcagtggtcagggacatgaagaaatacatcaaggctagaaaatacagacaaattccggtaggttactctgctgctgatatcgtcgctaacagacaattggctgctgaatactttaactgtggtgatgaagctgacgctagaatcgacatgtttggtgttaatgactattcttggtgtggtgaatcttcttttgtggtatctggttattccaccaagatgaagctttatcaagattactccgttcctgtcttcttaagtgaatttggttgtaaccaagtcaagagctctcgtccattcacagaaattgaagctatctattccactcaaatgtcttctgtattctccggtgggttagtctacgaatattccaatgaaactaacaattacgggctcgttcaaattgatggtgacaaggtcactaaattgacagattttgaaaacttgaaaaatgaatacagcaaagtatccaacccagaaggcaatggtggttacagtacttccaacaactattctacatgtcctgattatgaaaagggtgtctgggaagctaataacactttgcctgctatgccaagtgctgcttctgcttacttcacatctggagcaggttctcctatgggaaccggaatcgccacccaacaaagttgtgatgctaaggacgatgacgacgaagaagacgacgacacctcctcttcttcctcttcttcctcttcttcttcttcttccgcttcttcttcttctgaatcttcttccagcacttctaaggcatcttcctcctccccttctgctagcgaaacgagcttgttgaaatctgccgcatctgctacttcttccagccaatcttcctctaaatccaagggtgctgccggaattattgagattcctttgatattccgtgctttggcagaactttataacttggttttatga

SEQ ID NO: 10075 - DNA, 606 bp, Saccharomyces cerevisiae
atgaaaccagtaacatgttgcaaccaaaagaataacataatgccatccttagtccccgtttgctgttcagaaaagaaaatagaatccgatgctaagaaatcaatatcgaaatgctgtggagacaaagaaatctacgatagcgagaatagaccgatcactaaagaggatgggtcatggatacctggaagctgcaagcaatgtagatcagacccccatagtaggaatttttgtcaatcactttcgaataaatgtagttcaagctctttctcttccaacagtgcgttgtcaccggatctaaatgaacaacaaactgacgtaaattacaattcaatcaagctacccgaaatatgttcctgcaagaatgcacaaatgaatgcggcttccgatgcaaagaggtatctgccgatcagttacacatatcaaaaaatccgtcaacatatgcaaaaaaataaaagtatccaagaacaactaaatcctgaggattcaacttcgatctcatcagcgttagagaacattgcatctggattgcacgttcgtggacagaaagtagaattgcaaagcatcaaggatgcattacataagatggacaaaaacgtcttggaatga

SEQ ID NO: 10076 - DNA, 606 bp, Artificial Sequence
  Description of Artificial Sequence: Synthetic polynucleotide
atgaaaccagtaacatgttgcaaccaaaagaataacataatgccatccttagtccccgtttgctgttctgaaaagaaaatagaatccgatgctaagaaatctatatccaaatgctgtggagacaaagaaatctacgatagcgagaatagaccgatcactaaagaggatgggtcctggatacctggaagctgcaagcaatgtagaagtgacccccatagtaggaatttttgtcaatctctttctaataaatgtagtagtagctctttctcttccaacagtgcgttgtctccggatttgaatgaacaacaaactgacgtaaattacaattccatcaagttgcccgaaatatgttcctgcaagaatgcacaaatgaatgcggcttccgatgcaaagaggtatttaccgatcagttacacatatcaaaaaatccgtcaacatatgcaaaaaaataaaagtatccaagaacaattgaatcctgaggattctacttctatctcttctgcgttagagaacattgcatctggattgcacgttcgtggacagaaagtagaattgcaaagcatcaaggatgcattacataagatggacaaaaacgtcttggaatga

SEQ ID NO: 10077 - DNA, 738 bp, Saccharomyces cerevisiae
atgagacaacgaaggtctgtagtagcagttagcgtaaagcccaaaggcttcaaattggggcataaacagggttccatgtctacgacgtctccacctccatcctcaccagatggaaatgtgagtacatcaggaccgtcagctattaagttatccaagaattgggagttaccacagcgcctaaaaccgggccgcaaaccgaaatccaagcgcggggatgcatcagctaataatgatggatcgtccaagataaagaaggttcaaacttccaaccagaaagaccaaatgaccacaaaagatcatgagaacgaaggcgcaaaaggtcatgaggggaaatctgatgatgaaggcaacggaagtggtgatgaaaacggtgtcgatagcgtggaaaagcgaaggaggcaaaatagagatgcgcaaagagcatatagggaacgcagaacaacaagaatccaggttctggaagagaaggttgagatgctacacaatttggtcgatgattggcaaaggaaatataaactgctggaatctgagttttccgatacaaaggaaaacttgcaaaaatcaatagcattaaacaacgaattgcaaaaagccttgcctttgattgttaatactccatttcaacagcagccagaaaacccgccagacaatcctatttcgatattagaaatggtagaaaactttaaaccaatcggcgctgtcagtttaaaaaaaggaaagctgaaggcccattgttaa

SEQ ID NO: 10078 - DNA, 738 bp, Artificial Sequence
  Description of Artificial Sequence: Synthetic polynucleotide
atgagacaaagaaggtctgtagtagcagttagcgtaaagcccaaaggcttcaaattggggcataaacagggttccatgtctacgacgtctccacctccatcctctccagatggaaatgtgagtacatctggaccgagtgctattaagttatccaagaattgggagttaccacagcgcttaaaaccgggccgcaaaccgaaatccaagcgcggggatgcatctgctaataatgatggatcttccaagataaagaaggttcaaacttccaaccagaaagaccaaatgaccacaaaagatcatgagaacgaaggcgcaaaaggtcatgaggggaaatctgatgatgaaggcaacggaagtggtgatgaaaacggtgtcgatagcgtggaaaagagaaggaggcaaaatagagatgcgcaaagagcatatagggaacgcagaacaacaagaatccaggttttggaagagaaggttgagatgttgcacaatttggtcgatgattggcaaaggaaatataaattattggaatctgagttttccgatacaaaggaaaacttgcaaaaatctatagcattaaacaacgaattgcaaaaagccttgcctttgattgttaatactccatttcaacagcagccagaaaacccgccagacaatcctatttctatattagaaatggtagaaaactttaaaccaatcggcgctgtcagtttaaaaaaaggaaagttgaaggcccattgttga

SEQ ID NO: 10079 - DNA, 1722 bp, Saccharomyces cerevisiae
atgttgaatttcgcatcaagagcgtcatgtgtgacaagacgtcaagcaagcttgtattttgttaaaaatcaaggccctagattaatagcttccactattccctcgtgtcattggcctttgagagcgcaaggagtacagcccaactatcctttatctttgagattttattctactgataagtcgaaaagtgttacgaagcccgtagctccaacatccaccgatgctcctgccaagcccaaggagacgcttatggtcaaagtgaagcacgccttgaaacattatgctaatgggacgaaacttttgggttacgaaatcaaagtttctactaagcttttgattaaatttgctcagggttacgagttgtctagaagagagaggaaccaattgaggaggacaatgggcgatgtgtttaggttgatccctttttcagcgttccttattattccattcgccgaactatttttgcctttcgctttgaaactcttccccaacttactaccctccacttacgaatccggcaaggataagcaagccaagagaaataagctcatcgagatcagaaaaaagacatccgaattcttgcatgagactttggaagaatccaatttgatcacttacaacaccattgaaaatgcagagaagaagcaaaaatttttgaattttttccggaagctttattctgccaaggaaggtaagattatgactttccaacacgatgaaataagcgccattgcgcaaatgttcaaaaacgatagcgttttggataacttgtcaagaccacaattggcagcaatgtcgaagtttatgtcactaaggccatttggtaacgataacatgcttcgttaccaaattcgttccaaactaaaggatataatgaacgacgataaaactattgactacgaaggcgttgaaagtttatcgcaagaagagctgtatcaagcttgtgtgtctcgtggtatgaaagcgtacggtgtatccaaggaggacttggtcgataatctaaaagtttggctagaattgagactgagacaaaaaatcccatccgtcttgatggttttgagttccacgttcacgtttggaggacttccaaaggagaactattcaaaggcattctcgccactagctgaaaaaaaagaaacaaaaagcaaatatgacgaccttttggatctgtactacgacggtatattacaagtgctaagttccattccagatcccgtttacaacgtcgcaaaactagatgtatctgaatcgaaatcatccgctgctgaaactgaagctgaaaagcaagttgctgaaaagaagataaagacggaagaaaaacccgaggaaactgctataccgaaggaagaagccaccgcaaaagagtctgttatagctaccaccgcttctgcggttactcctaaactagtcgtagttaatgaaaaggcagaaacagcgaagacagaggaaatatctcaggaaaaagagaacgcagagcctaccgactctgcggaagccacggaagctgaagaaaagaagacatccgacgataacgagttcaaattgaacgttttgaaggagcaagaagaactaataaagaaggaggaagaggaagctaagcaaagagcttcgagagagcatgtgccagatgatatcaacctagatgaagaggaagaagcaaaatctgtacctcccattccggccgatcaagctgcgaagacttttgtcattaagaaagattga

SEQ ID NO: 10080 - DNA, 1722 bp, Artificial Sequence
  Description of Artificial Sequence: Synthetic polynucleotide
atgttgaatttcgcatctagagcgtcttgtgtgacaagacgtcaagcaagcttgtattttgttaaaaatcaaggccctagattaatagcttccactattcccagttgtcattggcctttgagagcgcaaggagtacagcccaactatcctttatctttgagattttattctactgataagagtaaaagtgttacgaagcccgtagctccaacatccaccgatgctcctgccaagcccaaggagacgcttatggtcaaagtgaagcacgccttgaaacattatgctaatgggacgaaacttttgggttacgaaatcaaagtttctactaagcttttgattaaatttgctcagggttacgagttgtctagaagagagaggaaccaattgaggaggacaatgggcgatgtgtttaggttgatccctttttctgcgttccttattattccattcgccgaattatttttgcctttcgctttgaaactcttccccaacttattgccctccacttacgaatccggcaaggataagcaagccaagagaaataagctcatcgagatcagaaaaaagacatccgaattcttgcatgagactttggaagaatccaatttgatcacttacaacaccattgaaaatgcagagaagaagcaaaaatttttgaattttttcagaaagctttattctgccaaggaaggtaagattatgactttccaacacgatgaaataagcgccattgcgcaaatgttcaaaaacgatagcgttttggataacttgtccagaccacaattggcagcaatgtccaagtttatgtctttgaggccatttggtaacgataacatgcttcgttaccaaattcgttccaaattgaaggatataatgaacgacgataaaactattgactacgaaggcgttgaaagtttatctcaagaagagttgtatcaagcttgtgtgtctcgtggtatgaaagcgtacggtgtatccaaggaggacttggtcgataatttgaaagtttggttagaattgagattgagacaaaaaatcccatccgtcttgatggttttgagttccacgttcacgtttggaggacttccaaaggagaactattccaaggcattctctccattggctgaaaaaaaagaaacaaaaagcaaatatgacgaccttttggatttatactacgacggtatattacaagtgttgagttccattccagatcccgtttacaacgtcgcaaaattggatgtatctgaaagtaaatcttccgctgctgaaactgaagctgaaaagcaagttgctgaaaagaagataaagacggaagaaaaacccgaggaaactgctataccgaaggaagaagccaccgcaaaagagtctgttatagctaccaccgcttctgcggttactcctaaattggtcgtagttaatgaaaaggcagaaacagcgaagacagaggaaatatctcaggaaaaagagaacgcagagcctaccgactctgcggaagccacggaagctgaagaaaagaagacatccgacgataacgagttcaaattgaacgttttgaaggagcaagaagaattgataaagaaggaggaagaggaagctaagcaaagagcttccagagagcatgtgccagatgatatcaaccttgatgaagaggaagaagcaaaatctgtacctcccattccggccgatcaagctgcgaagacttttgtcattaagaaagattga

SEQ ID NO: 10081 - DNA, 342 bp, Saccharomyces cerevisiae
atgacagaggttgtgggattctgggagagcgtgtcagatgacgaatcagaagacaaagactgtatggaggtgcagaacacagtgagtgccgacgagagcccacttgtgcagagccttgtatcctttgtaggctcgtgctccatcaacctacttttgcccttcctcaacggcatgatgctcggcttcggcgagctatttgctcacgagctctgctggagattcaattggtttaaccatagaaacaaggggtataaggtgtacccagagtcgcgcaaaatagcagcattgaaagagatttcaagccctggcacccgtgggagggttgcgtccaagttcctttaa

SEQ ID NO: 10082 - DNA, 342 bp, Artificial Sequence
  Description of Artificial Sequence: Synthetic polynucleotide
atgacagaggttgtgggattctgggagagcgtgtctgatgacgaaagtgaagacaaagactgtatggaggtgcagaacacagtgagtgccgacgagagcccacttgtgcagagccttgtatcctttgtaggctcctgctccatcaacttacttttgcccttcctcaacggcatgatgctcggcttcggcgagttatttgctcacgagctctgctggagattcaattggtttaaccatagaaacaaggggtataaggtgtacccagagtcccgcaaaatagcagcattgaaagagatttctagccctggcacccgtgggagggttgcgtccaagttcctttga

SEQ ID NO: 10083 - DNA, 1983 bp, Saccharomyces cerevisiae
atgagcttgcacattagtaaactgattgagcaatatcgttccactaaggacaatgaccttaaatatatgcttttaaggcaaaactttaaaattaacgacatagaggatgagctggctcctcttgttaacgaattgctgctcccggtattggtcgaagaacaagacatggaaattctcaacctagtatcgtttcaagtgctccccgatttagttctttctatgatcagcgaccctgcagctgctcagttgggatgggtaataagcttgatatgcgaccctttattaaaccaaagcatgatacatgcaaatcgttcttttgttctgattgagacactaagaaatgtgttacaaaaaattgaaaactcccctcatttagattaccaccaaccagtaaacagttcattagagtttatctccaaatttattgttgaaatgaaaaggcatatgtgtgatgtggatgctgcgcagctttcacattcactttctgaaagcaatatgctaatttacatagaatcccttaatctattgctaaaatttagcttcttttcagacgcggcaagtccttcagtaatggtcacactgccctttgatattttgaatgacgtttttacaattgcgcaggactattctgctacgaatacaaatgaaagcattgataggatcacagaaaaattacttttgacttctacgcaattaactcatccggtggacctggaaaatttatgccccaaaatgaagtacaatactttagcagcagtttctcgaatatggtacaaatttggccccatagtcgataaattatttactaaccggctattaccggttctattccccccgcaaatgggagaagaatgtaacgtcgaagatgttctcgaaatagttcataacttccatccatatttttctattcgtaggctaaaggataataggcctctattgtcagattcgactattagccagctaagagagggtttgtttggtatgctcagcatattaaacgactcgctgacaaggacgcaaaatgaaaacgaccatggtagcgacaatctgatcgacagtgacgacggatttggctcagacaacgatcctgaacaacaagcgtacctcgatgaactcgtatcagaaggttatgacgaaaacatgtatgacggtgatacggatgacgaagacgcagatgatataaacgttgaaaaaaatgatgaagccaccaaagacattacagaaacgaacaaaatccttttaatcttttctgagttacattatcctcaggaggagcgcttctctgaactgttggttgagttgcagactaagatcgctataaacacatccttaattgataaaattctttcaaaagagacaacagaattacccactcacaatggggaaatcgcagatttgaacgaaattctaaatgaagtgaaaggcaataaaccaattagaaaaaacgttattttttgtacgttagcgcatactttgtcgttgcaatccggttccgaattgtctgttctacagctatcaatagaggttattgatcatctgctggttaaaaatcattcaaataacatcactcgtggcgagcaatttcaattgattaagttgatattaccccatctaaaaacaaataaatcttttattgatacattaaaagcaggaaattttacccaaaaaattgatgaaggagtgaccttaagaacaatgattctttctctactactacaactattcccactggattactctatgctaggtgagattttacccactattgcgcgatattctgtaagggataaggatcttggggtgagagatctgtccttccaattgctggaccaaattctacgcacatactataattacctaattggtatcgattgggaatggtataaagatgacttctatcaagttttgcaagaaacttgtattaaaaaagacataaataccaacctcttgctacaatttcctccttatctccctcatgactag

SEQ ID NO: 10084 - DNA, 1983 bp, Artificial Sequence
  Description of Artificial Sequence: Synthetic polynucleotide
atgagcttgcacattagtaaattgattgagcaatatcgttccactaaggacaatgaccttaaatatatgcttttaaggcaaaactttaaaattaacgacatagaggatgagttggctcctcttgttaacgaattgttgctcccggtattggtcgaagaacaagacatggaaattctcaacttggtatcctttcaagtgctccccgatttagttctttctatgatcagcgaccctgcagctgctcagttgggatgggtaataagcttgatatgcgaccctttattaaaccaaagcatgatacatgcaaatcgttcttttgttttgattgagacattaagaaatgtgttacaaaaaattgaaaactcccctcatttagattaccaccaaccagtaaacagttctttagagtttatctccaaatttattgttgaaatgaaaaggcatatgtgtgatgtggatgctgcgcagctttctcattctctttctgaaagcaatatgttgatttacatagaatcccttaatttattgttgaaatttagcttcttttctgacgcggcaagtccttctgtaatggtcacattaccctttgatattttgaatgacgtttttacaattgcgcaggactattctgctacgaatacaaatgaaagcattgataggatcacagaaaaattacttttgacttctacgcaattaactcatccggtggacttggaaaatttatgccccaaaatgaagtacaatactttagcagcagtttctagaatatggtacaaatttggccccatagtcgataaattatttactaacagattattaccggttttgttccccccgcaaatgggagaagaatgtaacgtcgaagatgttctcgaaatagttcataacttccatccatatttttctattcgtaggttaaaggataataggcctttattgagtgattctactattagccagttaagagagggtttgtttggtatgctcagcatattaaacgactctttaacaaggacgcaaaatgaaaacgaccatggtagcgacaatttgatcgacagtgacgacggatttggctctgacaacgatcctgaacaacaagcgtacctcgatgaactcgtatctgaaggttatgacgaaaacatgtatgacggtgatacggatgacgaagacgcagatgatataaacgttgaaaaaaatgatgaagccaccaaagacattacagaaacgaacaaaatccttttaatcttttctgagttacattatcctcaggaggagcgcttctctgaattattggttgagttgcagactaagatcgctataaacacatccttaattgataaaattctttctaaagagacaacagaattacccactcacaatggggaaatcgcagatttgaacgaaattttgaatgaagtgaaaggcaataaaccaattagaaaaaacgttattttttgtacgttagcgcatactttgtctttgcaatccggttccgaattgtctgttttacagttatctatagaggttattgatcatttattggttaaaaatcattctaataacatcactcgtggcgagcaatttcaattgattaagttgatattaccccatttgaaaacaaataaatcttttattgatacattaaaagcaggaaattttacccaaaaaattgatgaaggagtgaccttaagaacaatgattctttctttattattacaattattcccattagattactctatgttgggtgagattttacccactattgcgagatattctgtaagggataaggatcttggggtgagagatttatccttccaattgttggaccaaattttgcgcacatactataattacttgattggtatcgattgggaatggtataaagatgacttctatcaagttttgcaagaaacttgtattaaaaaagacataaataccaacctcttgttgcaatttcctccttatctccctcatgactga

SEQ ID NO: 10085 - DNA, 519 bp, Saccharomyces cerevisiae
atgtcaaaactatcgtcttatcctcatgccgccgattttataaatatggaagaaccgccaaaatctaaagagtttttcgatgatctttgtgccgtccctaatttactcaaaagacgttttccaaactctcgaagatcgacgcattattgtgaggctttaaattattctaggaaaaagcttcctgttgtgttgtctaaaatgacactgcaagagttgaggcacaatatgtcaacattttttttgcaggaaaaggatcaaataaatatttatgacacctgtaaggtgatagacatgggggaccgtgtcttgctcgaaactatgcctccacagccaagagatttatttgaaaaattgcatgcaagtaaaacaaatttagtagttcagacagcagctttggatgaacccctacttacagtaaaagcagagctacagtcatcttcctttccacaaaaatcaagcctatttctgtatgaggattataaaaaatttatttatcaacaactagatatgtttagttaa

SEQ ID NO: 10086 - DNA, 519 bp, Artificial Sequence
  Description of Artificial Sequence: Synthetic polynucleotide
atgtccaaattatcttcttatcctcatgccgccgattttataaatatggaagaaccgccaaaatctaaagagtttttcgatgatctttgtgccgtccctaatttactcaaaagacgttttccaaactctagaagatctacgcattattgtgaggctttaaattattctaggaaaaagcttcctgttgtgttgtctaaaatgacattacaagagttgaggcacaatatgtctacattttttttgcaggaaaaggatcaaataaatatttatgacacctgtaaggtgatagacatgggggaccgtgtcttgctcgaaactatgcctccacagccaagagatttatttgaaaaattgcatgcaagtaaaacaaatttagtagttcagacagcagctttggatgaacccttgcttacagtaaaagcagagttacagtcttcttcctttccacaaaaaagtagcttgtttttatatgaggattataaaaaatttatttatcaacaattggatatgtttagttga

SEQ ID NO: 10087 - DNA, 2031 bp, Saccharomyces cerevisiae
atgctcagaagacacggattattctggttaaagacatgtccccgtctaaatgttcttctaaatcaatccataccgatacctcatttgcttcatagccgtgatatttgccagcaaagatggtatgcaaaagggaaaagaaggaaccagatttccaagaaagagttaaagcctctcaatttttctattccgaattatatttctgtgaataaattggccaatttgttaaattgtcgtgtggaaagattaatcaaagatttgacagcattaggtttcgaaaatattacaaccacgtatatattatcaaaagaatacgtcgaattgattttacaagaatacaactttgcccttccgaatctgtcaacgtctacaaatttagataatgtttatgatgagctaaaatctcctgtaaacccaaaattattaaccaaaagagcccccgtggtaactataatgggccatgttgatcatggtaagaccactatcatagactatctaaggaaatcttctgttgtggctcaagaacatggtggaatcacgcaacacattggtgcctttcaaataacagctccgaagtctgggaaaaagatcacatttttagacacccctggccatgctgcctttttgaaaatgagagaaagaggtgcaaatattactgatattattgttttggtggtatctgtagaagattctctgatgccccagacattagaagccataaaacatgccaaaaattcaggaaatgaaatgataattgcaataacgaaaatagatagaattccacagccaaaagaacgtgaaaaaaaaattgaaaaagttataaatgatttgattgttcaaggaataccagtagagaaaattggcggagacgttcaagtgatcccgataagtgccaaaactggtgagaacatggaccttttagaggaatcaatagtcctattaagtgaagtaatggatataagagctgaaaactcccctaaaactatcgcagagggttggattatcgaaagtcaagttaaaaaacaggtcggaaatgtggcgaccgtcttggttaagaagggcactttacaaaaagggaaaattctaatttgtggtaatacattctgcaagatcaaaaatttaattgatgataagggcataccgattcttaaggcaacaccatcatatgctacagaggttcttggttggaaagatgtaccccatgttggagatgaggtcattcaggtaaagagcgaagcgatcgctaaaaagttcatcagtaaaaggcaagatcttatcgaagttcaaaaaaactctagtatcgttgaaaaattaaatgaagaaagggcccttgccaaagagcaacacctaaataaggaactggaacatgagaatactgtccaggaacacgaacaaaatactggtcctaaacttattaattacatcatcaaatgtgatgtctctggctcagcagaagcggtttcagaaagcatttcctctctaggaaatgacgaagtgagatgtaatgttatctcttcttctgttggtatacctacggaaagtgacttaaagatggcgcaaataacggagagtacaattctatgcttcaatttggggaatttgccgagtgaggtgatcaacaatcgtgctggcatcaaaataaaacagtacaatgttatctataagctaattgaagacgtcactgaaacactaactgaaaatctaaagcccatctttgaaaaaaagatcgtttcaactgttgacgttcgtgaaacttttgactttaggttaaagaaaaaaattattaggattgcaggttgcaaagtaaacaacggtgtcatcaaaaagaattcattggtgcaggtagttagaggtcctaacgaagatgtaatttttgatgggaaaatctctactttgaagcacaataaagatgacgtagcagaagtttcaaaagggcatgaatgtggaatcacttttgagagtggattcgagggtttcaaaccaggtgataagatcctagtttatgaaaacgtgcgagttcctcgttacttgtaa

SEQ ID NO: 10088 - DNA, 2031 bp, Artificial Sequence
  Description of Artificial Sequence: Synthetic polynucleotide
atgctcagaagacacggattattctggttaaagacatgtccccgtttgaatgttcttttgaatcaatccataccgatacctcatttgcttcatagccgtgatatttgccagcaaagatggtatgcaaaagggaaaagaaggaaccagatttccaagaaagagttaaagcctctcaatttttctattccgaattatatttctgtgaataaattggccaatttgttaaattgtcgtgtggaaagattaatcaaagatttgacagcattaggtttcgaaaatattacaaccacgtatatattatccaaagaatacgtcgaattgattttacaagaatacaactttgcccttccgaatttatctacgtctacaaatttagataatgtttatgatgagttgaaatctcctgtaaacccaaaattattaaccaaaagagcccccgtggtaactataatgggccatgttgatcatggtaagaccactatcatagactatttgaggaaatcttctgttgtggctcaagaacatggtggaatcacgcaacacattggtgcctttcaaataacagctccgaagtctgggaaaaagatcacatttttagacacccctggccatgctgcctttttgaaaatgagagaaagaggtgcaaatattactgatattattgttttggtggtatctgtagaagattctttgatgccccagacattagaagccataaaacatgccaaaaattctggaaatgaaatgataattgcaataacgaaaatagatagaattccacagccaaaagaacgtgaaaaaaaaattgaaaaagttataaatgatttgattgttcaaggaataccagtagagaaaattggcggagacgttcaagtgatcccgataagtgccaaaactggtgagaacatggaccttttagaggaaagtatagtccttttaagtgaagtaatggatataagagctgaaaactcccctaaaactatcgcagagggttggattatcgaaagtcaagttaaaaaacaggtcggaaatgtggcgaccgtcttggttaagaagggcactttacaaaaagggaaaattttaatttgtggtaatacattctgcaagatcaaaaatttaattgatgataagggcataccgattcttaaggcaacaccatcttatgctacagaggttcttggttggaaagatgtaccccatgttggagatgaggtcattcaggtaaagagcgaagcgatcgctaaaaagttcatcagtaaaaggcaagatcttatcgaagttcaaaaaaactctagtatcgttgaaaaattaaatgaagaaagggcccttgccaaagagcaacacttgaataaggaattggaacatgagaatactgtccaggaacacgaacaaaatactggtcctaaacttattaattacatcatcaaatgtgatgtctctggcagtgcagaagcggtttctgaaagcatttcctctttgggaaatgacgaagtgagatgtaatgttatctcttcttctgttggtatacctacggaaagtgacttaaagatggcgcaaataacggagagtacaattttgtgcttcaatttggggaatttgccgagtgaggtgatcaacaatcgtgctggcatcaaaataaaacagtacaatgttatctataagttgattgaagacgtcactgaaacattgactgaaaatttgaagcccatctttgaaaaaaagatcgtttccactgttgacgttcgtgaaacttttgactttaggttaaagaaaaaaattattaggattgcaggttgcaaagtaaacaacggtgtcatcaaaaagaattctttggtgcaggtagttagaggtcctaacgaagatgtaatttttgatgggaaaatctctactttgaagcacaataaagatgacgtagcagaagtttccaaagggcatgaatgtggaatcacttttgagagtggattcgagggtttcaaaccaggtgataagatcttggtttatgaaaacgtgagagttcctcgttacttgtga

SEQ ID NO: 10089 - DNA, 1227 bp, Saccharomyces cerevisiae
atgtccaaaatagaagagctaccaccatcagatactgatgaccattcgtattctagtaaaccgggagatgtatttttagcatttgtggacgcacctgttaaagagactgatgacatattagttgaagatagctttattggcggtgaacctaagtggctacatccggattccgaaccacctgctgaactattgaaatgtggtgcttgtaaatcagcggataatatgaagctgttactacaagctttttcgcccttagatgatgagcagatgagtgccatacaacaacgtcttggtatcaataatatgagctatattaatccccaggatgacagagtattatatgtcttcctgtgtaccgaatgtcaaaggaagggcaattctgttcgctgtatcagaggagtaaagaagaataaaaacgttgatagcctttccgaaaaaatggcttcaacttcattggaaaaagacttccaaatcaatccctttgacttgtcgaataattcagattctaaatgtaatgctttttcaagcaacccatttggcggtgcaaatgctaacccttttggagctgatagcattaattccaatatatcacaaagcaaggacgaaggcaaaaagaaggaatctgctaccgtttctgcaaagacggcgagaaaactacatgatttacaaaaggacaaagaatacgatggcaataaatgctttaaaagttgtttgttgtacgttgaagaggaaaccttcaaaaataaaaagccagctcatctgcagctgccaaaaaatttaaaaattgataaggaggcactagatttaacaggagatgaggatctcgaaaaagatccgatcaaattggacccgaggacagaaaaattatccaagtttcttgatgacgacacattccaaaaattccaagaagtggttggttacaacccgcttcaagtattacgttatgacttaggcggaaaacctttgctatatgccgaaacaaaagtcgatattttaagcactgtgccaagaccgggctacaacccatcgagccaaagaatctttgaaatgcagttaatgccaaagatgatttttgatctggaagaagtagtgtctgtcgataacggcatggaatggggtaccattcttgttttcactgatgttgaaaattacatgcctgaatttgatgaacatggtgtcggttatgtagaagaatgtgtcaaagttcagtgggaatcgagaacgtga

SEQ ID NO: 10090 - DNA, 1227 bp, Artificial Sequence
  Description of Artificial Sequence: Synthetic polynucleotide
atgtccaaaatagaagagttaccaccaagtgatactgatgaccattcttattctagtaaaccgggagatgtatttttagcatttgtggacgcacctgttaaagagactgatgacatattagttgaagatagctttattggcggtgaacctaagtggttacatccggattccgaaccacctgctgaattattgaaatgtggtgcttgtaaatctgcggataatatgaagcttttattacaagctttttctcccttagatgatgagcagatgagtgccatacaacaacgtcttggtatcaataatatgagctatattaatccccaggatgacagagtattatatgtcttcttgtgtaccgaatgtcaaaggaagggcaattctgttcgctgtatcagaggagtaaagaagaataaaaacgttgatagcctttccgaaaaaatggcttccacttctttggaaaaagacttccaaatcaatccctttgacttgagcaataattctgattctaaatgtaatgctttttctagcaacccatttggcggtgcaaatgctaacccttttggagctgatagcattaattccaatatatctcaaagcaaggacgaaggcaaaaagaaggaatctgctaccgtttctgcaaagacggcgagaaaattgcatgatttacaaaaggacaaagaatacgatggcaataaatgctttaaaagttgtttgttgtacgttgaagaggaaaccttcaaaaataaaaagccagctcatttacagttaccaaaaaatttaaaaattgataaggaggcattggatttaacaggagatgaggatctcgaaaaagatccgatcaaattggacccgaggacagaaaaattatccaagtttcttgatgacgacacattccaaaaattccaagaagtggttggttacaacccgcttcaagtattacgttatgacttaggcggaaaacctttgttatatgccgaaacaaaagtcgatattttaagcactgtgccaagaccgggctacaacccatccagccaaagaatctttgaaatgcagttaatgccaaagatgatttttgatttggaagaagtagtgtctgtcgataacggcatggaatggggtaccattcttgttttcactgatgttgaaaattacatgcctgaatttgatgaacatggtgtcggttatgtagaagaatgtgtcaaagttcagtgggaatctagaacgtga

SEQ ID NO: 10091 - DNA, 3006 bp, Saccharomyces cerevisiae
atgtcagttcccgctatcgcccccagacggaagagacttgcagatggtttaagcgtcactcagaaggtgtttgtaaggtctcgtaatggaggcgctaccaagatcgtaagagaacactatttaagatcggacatcccatgtctttcgagaagttgtaccaagtgtccgcaaattgtcgtccccgatgctcaaaatgagttgccgaagttcatcttgtcagattctcccttagaattaagcgcacccattggtaagcattacgtcgtcttggataccaacgtggtgttacaggcaattgaccttttagagaatccgaattgttttttcgacgtcattgtcccccagattgtcctagatgaagtgagaaacaagtcatatccggtgtacacgagattaagaactctatgcagagatagtgacgatcataagagattcatcgtgtttcataacgaatttagtgaacatacttttgtggaaaggcttccaaatgaaacgattaatgacagaaacgacagggctataaggaaaacctgtcaatggtatagtgagcacttgaaaccttatgacataaacgtcgttcttgttaccaacgatcgtttgaatagagaagctgccactaaggaagtggagtccaatataataaccaagagcttggtacagtatatcgagttactaccaaatgcagacgacatcagagactctattcctcaaatggattcttttgataaagatcttgaaagggacacattttcagatttcacgttcccggagtactattctacagcaagagtaatgggtggtttgaaaaatggcgttttgtaccagggcaatattcaaatatcagagtacaactttctagaaggttcagtgagtttaccaagattttccaaaccagtgttaattgttgggcagaaaaacctaaatagagcattcaacggtgaccaggttatcgtggaactgctacctcaatcagaatggaaggcaccctcatccattgtcttggattctgaacatttcgacgttaacgataaccccgatattgaggctggcgatgacgatgacaataatgagtcctcttccaataccaccgtgatttccgacaagcagcgcaggctgcttgctaaagatgctatgatagctcaaagatcgaaaaaaattcagcccacggcaaaagttgtatatatacaaagaagatcctggagacagtacgtcggtcaactagcaccaagttctgttgatccacaaagcagtagtacacagaatgtcttcgttattttgatggacaaatgtcttccaaaagtcagaatcagaacaaggcgtgctgctgaattattggataagaggattgtcatttccattgattcgtggcccaccactcataaatacccattaggtcactttgtgagagacctcggtacaattgaatctgctcaagctgaaacagaggccttattgttggagcatgatgttgaatataggcctttttccaagaaagttctagaatgtttgcccgcagaaggccacgattggaaggccccaacaaaactggacgatcctgaggctgtttcaaaggatccattattgacaaaaagaaaggatctcagagataaacttatatgtagtatcgatcctccaggatgtgttgatattgacgatgccctacatgcgaaaaagcttccaaacggtaattgggaagttggtgttcatattgctgatgttactcacttcgttaaaccgggcactgccctggatgcggaaggtgctgcaagaggtacttctgtatatttggtagacaaacgtattgacatgctgcccatgcttctaggtaccgacctgtgttctctaaaaccatacgttgatagattcgcattctctgtcatttgggaattggatgatagtgctaatattgtaaatgttaattttatgaaatccgtcatcagatctagagaagctttctcatacgaacaagcacaactgagaattgatgacaaaacccaaaatgatgaattaacgatgggtatgagggctctcttgaaattgtctgtaaaactgaagcaaaagagactagaggcaggtgccttgaacttagcttctcctgaggttaaggtccatatggatagtgagacttcagatccaaatgaagtggaaatcaaaaaattactggcgacaaattctttagttgaagaatttatgttgttggctaatatatcagtggcaaggaagatatacgatgccttccctcaaacggcgatgctaagaagacacgcagctccgccatctaccaattttgaaatcttaaatgaaatgttaaacacaagaaagaatatgtcaatttcgttggaatcgtccaaggccttggccgattctttagacaggtgtgtggatcccgaagatccatattttaatacattggttcgtatcatgtcgactcgctgtatgatggcagcccaatacttttattctggagcttattcttatcctgactttagacactatggtttagccgttgatatctacacacatttcacatcacctattagacgttactgtgatgttgtggcccatagacaattagcaggtgccattgggtatgaacccctaagtttgactcatcgtgataagaataaaatggacatgatttgcagaaatatcaacagaaagcacagaaacgcccaattcgccggtagggcaagcatagaatactatgtcgggcaagtaatgaggaataacgagtccacagaaactggatatgttattaaggtatttaataatggtatagtcgtactggttcccaagtttggcgtggaaggcttgataagactggataatttgactgaggatcctaactcagccgcttttgatgaggtggaatacaaattaacctttgtgcctacaaattcagataaaccgagggatgtttacgttttcgataaggtcgaagttcaagttaggtcggtgatggatccaattactagcaagcgtaaggcagaattattgttaaaatag

SEQ ID NO: 10092 - DNA, 3006 bp, Artificial Sequence
  Description of Artificial Sequence: Synthetic polynucleotide
atgtctgttcccgctatcgcccccagaagaaagagacttgcagatggtttaagcgtcactcagaaggtgtttgtaaggtctcgtaatggaggcgctaccaagatcgtaagagaacactatttaagaagtgacatcccatgtctttctagaagttgtaccaagtgtccgcaaattgtcgtccccgatgctcaaaatgagttgccgaagttcatcttgagtgattctcccttagaattaagcgcacccattggtaagcattacgtcgtcttggataccaacgtggtgttacaggcaattgaccttttagagaatccgaattgttttttcgacgtcattgtcccccagattgtcttggatgaagtgagaaacaagagttatccggtgtacacgagattaagaactttgtgcagagatagtgacgatcataagagattcatcgtgtttcataacgaatttagtgaacatacttttgtggaaaggcttccaaatgaaacgattaatgacagaaacgacagggctataaggaaaacctgtcaatggtatagtgagcacttgaaaccttatgacataaacgtcgttcttgttaccaacgatcgtttgaatagagaagctgccactaaggaagtggagtccaatataataaccaagagcttggtacagtatatcgagttattaccaaatgcagacgacatcagagactctattcctcaaatggattcttttgataaagatcttgaaagggacacattttctgatttcacgttcccggagtactattctacagcaagagtaatgggtggtttgaaaaatggcgttttgtaccagggcaatattcaaatatctgagtacaactttttggaaggttctgtgagtttaccaagattttccaaaccagtgttaattgttgggcagaaaaacttgaatagagcattcaacggtgaccaggttatcgtggaattattgcctcaaagtgaatggaaggcaccctcttccattgtcttggattctgaacatttcgacgttaacgataaccccgatattgaggctggcgatgacgatgacaataatgagtcctcttccaataccaccgtgatttccgacaagcagcgcaggttacttgctaaagatgctatgatagctcaaagaagtaaaaaaattcagcccacggcaaaagttgtatatatacaaagaagatcctggagacagtacgtcggtcaattggcaccaagttctgttgatccacaaagcagtagtacacagaatgtcttcgttattttgatggacaaatgtcttccaaaagtcagaatcagaacaaggcgtgctgctgaattattggataagaggattgtcatttccattgattcttggcccaccactcataaatacccattaggtcactttgtgagagacctcggtacaattgaatctgctcaagctgaaacagaggccttattgttggagcatgatgttgaatataggcctttttccaagaaagttttggaatgtttgcccgcagaaggccacgattggaaggccccaacaaaattagacgatcctgaggctgtttccaaggatccattattgacaaaaagaaaggatctcagagataaacttatatgtagtatcgatcctccaggatgtgttgatattgacgatgccttgcatgcgaaaaagcttccaaacggtaattgggaagttggtgttcatattgctgatgttactcacttcgttaaaccgggcactgccttggatgcggaaggtgctgcaagaggtacttctgtatatttggtagacaaacgtattgacatgttgcccatgcttttgggtaccgacttatgttctttgaaaccatacgttgatagattcgcattctctgtcatttgggaattggatgatagtgctaatattgtaaatgttaattttatgaaatccgtcatcagatctagagaagctttctcttacgaacaagcacaattgagaattgatgacaaaacccaaaatgatgaattaacgatgggtatgagggctctcttgaaattgtctgtaaaattgaagcaaaagagattggaggcaggtgccttgaacttagcttctcctgaggttaaggtccatatggatagtgagacttctgatccaaatgaagtggaaatcaaaaaattattggcgacaaattctttagttgaagaatttatgttgttggctaatatatctgtggcaaggaagatatacgatgccttccctcaaacggcgatgttgagaagacacgcagctccgccatctaccaattttgaaatcttaaatgaaatgttaaacacaagaaagaatatgtctatttctttggaatcttccaaggccttggccgattctttagacaggtgtgtggatcccgaagatccatattttaatacattggttcgtatcatgtctactcgctgtatgatggcagcccaatacttttattctggagcttattcttatcctgactttagacactatggtttagccgttgatatctacacacatttcacatctcctattagacgttactgtgatgttgtggcccatagacaattagcaggtgccattgggtatgaacccttgagtttgactcatcgtgataagaataaaatggacatgatttgcagaaatatcaacagaaagcacagaaacgcccaattcgccggtagggcaagcatagaatactatgtcgggcaagtaatgaggaataacgagtccacagaaactggatatgttattaaggtatttaataatggtatagtcgtattggttcccaagtttggcgtggaaggcttgataagattagataatttgactgaggatcctaactctgccgcttttgatgaggtggaatacaaattaacctttgtgcctacaaattctgataaaccgagggatgtttacgttttcgataaggtcgaagttcaagttaggtctgtgatggatccaattactagcaagcgtaaggcagaattattgttaaaatga

SEQ ID NO: 10093 - DNA, 1779 bp, Saccharomyces cerevisiae
atgaccgaagactttatttcttctgtcaagcgttcaaatgaggagctgaaggagcgaaaatctaactttggatttgtagaatacaaatccaagcaattaacatcatcctcatcacacaattcaaactcatcgcatcacgatgatgacaaccaacacggcaagaggaatattttccagcgatgtgttgattctttcaagtctcctctggacggctcgttcgacacaagtaatttgaagaggactctgaaaccaaggcacttaatcatgattgccattgggggcagtataggtactggtttgtttgtcggtagtggtaaggcaatcgccgaaggtggtcctcttggtgtcgtcattggttgggctattgcaggctctcaaatcatcgggacgattcatgggctaggtgaaatcacggtgcggttccccgttgtcggggcctttgccaattacggcacaaggtttttggatccaagtataagttttgttgtttcgaccatatacgtgctacagtggttttttgtattacccttagaaatcattgcggcggcaatgaccgtacagtactggaactcgtctattgaccccgtaatttgggtagccatcttttatgctgttattgtttccataaatttgtttggtgtacgaggttttggggaagcggaatttgcattttccaccataaaagcaataacagtttgcggattcattatattgtgcgttgtcctcatttgcggtggaggtcccgaccacgagttcattggcgccaaatactggcacgaccctggttgtttggccaatgggttcccgggcgttctatctgttcttgttgttgcttcgtattctctcggtggtatagaaatgacgtgcctggcatcaggtgaaacggaccccaaaggcttaccaagtgctatcaagcaagtgttttggaggatcttatttttctttttgatatcactgaccctggtaggattcctggttccatatacaaaccaaaacttactgggtggttcatctgtggacaactcaccttttgtcattgccataaaattgcatcacattaaagccttgccctccatcgtcaatgcggtcatccttatcagtgttttgagtgtaggtaactcctgcatcttcgcttcaagtagaacgttgtgttcgatggcccaccaaggccttattccatggtggtttggttatatcgaccgtgctggtaggccactggttggcattatggcaaattcactatttggattactagcatttctggtcaaatctggctcgatgtctgaagttttcaattggttaatggccattgccggcctggccacgtgcattgtctggttgagcatcaacctgtcacatatcagatttagactggcgatgaaggctcaagggaagtctctggatgaattagaatttgttagtgctgtcgggatttggggatcagcgtattccgctttaatcaactgtctaatcttgatagctcaattctattgttcactatggcccattggtggctggaccagcggcaaagaaagggctaaaatattttttcaaaattatctgtgtgccttaatcatgttatttatattcatcgtccacaaaatttattacaagtgtcaaacaggcaaatggtggggggttaaggcgttaaaggacatagatttggaaaccgatcgtaaagatatcgacatcgaaatagtcaagcaagaaattgccgaaaagaaaatgtacctagattcccgtccatggtacgtgagacagttccatttctggtgttaa

SEQ ID NO: 10094 - DNA, 1779 bp, Artificial Sequence
  Description of Artificial Sequence: Synthetic polynucleotide
atgaccgaagactttatttcttctgtcaagcgttccaatgaggagttgaaggagagaaaatctaactttggatttgtagaatacaaatccaagcaattaacatcttcctcttctcacaatagcaactcttctcatcacgatgatgacaaccaacacggcaagaggaatattttccagcgttgtgttgattctttcaagtctcctttggacggcagtttcgacacaagtaatttgaagaggactttgaaaccaaggcacttaatcatgattgccattgggggcagtataggtactggtttgtttgtcggtagtggtaaggcaatcgccgaaggtggtcctcttggtgtcgtcattggttgggctattgcaggctctcaaatcatcgggacgattcatgggttaggtgaaatcacggtgaggttccccgttgtcggggcctttgccaattacggcacaaggtttttggatccaagtataagttttgttgtttctaccatatacgtgttacagtggttttttgtattacccttagaaatcattgcggcggcaatgaccgtacagtactggaactcttctattgaccccgtaatttgggtagccatcttttatgctgttattgtttccataaatttgtttggtgtaagaggttttggggaagcggaatttgcattttccaccataaaagcaataacagtttgcggattcattatattgtgcgttgtcctcatttgcggtggaggtcccgaccacgagttcattggcgccaaatactggcacgaccctggttgtttggccaatgggttcccgggcgttttatctgttcttgttgttgcttcttattctctcggtggtatagaaatgacgtgcttggcatctggtgaaacggaccccaaaggcttaccaagtgctatcaagcaagtgttttggaggatcttatttttctttttgatatctttaaccttggtaggattcttggttccatatacaaaccaaaacttattgggtggttcttctgtggacaactctccttttgtcattgccataaaattgcatcacattaaagccttgccctccatcgtcaatgcggtcatccttatcagtgttttgagtgtaggtaactcctgcatcttcgcttccagtagaacgttgtgttccatggcccaccaaggccttattccatggtggtttggttatatcgaccgtgctggtaggccattagttggcattatggcaaattctttatttggattattggcatttttagtcaaatctggctctatgtctgaagttttcaattggttaatggccattgccggcttggccacgtgcattgtctggttgagcatcaacttatctcatatcagatttagattagcgatgaaggctcaagggaagtctttagatgaattagaatttgttagtgctgtcgggatttggggaagtgcgtattccgctttaatcaactgtttaatcttgatagctcaattctattgttctctttggcccattggtggctggaccagcggcaaagaaagggctaaaatattttttcaaaattatttatgtgccttaatcatgttatttatattcatcgtccacaaaatttattacaagtgtcaaacaggcaaatggtggggggttaaggcgttaaaggacatagatttggaaaccgatcgtaaagatatcgacatcgaaatagtcaagcaagaaattgccgaaaagaaaatgtacttggattcccgtccatggtacgtgagacagttccatttctggtgttga

SEQ ID NO: 10095 - DNA, 153 bp, Saccharomyces cerevisiae
atgtctaacacctttgttgcagtcgaattctcgtggctgtacgcaatttctcttatcctaccgtgtgaaacaattcgcgtcgcgtgggcgccgaaaagggcttatcacggcacatctgaagaaaagagacggctggctccagctgatatttag

SEQ ID NO: 10096 - DNA, 153 bp, Artificial Sequence
  Description of Artificial Sequence: Synthetic polynucleotide
atgtctaacacctttgttgcagtcgaattcagttggttatacgcaatttctcttatcttaccgtgtgaaacaattcgcgtcgcgtgggcgccgaaaagggcttatcacggcacatctgaagaaaagagaagattggctccagctgatatttga

SEQ ID NO: 10097 - DNA, 1656 bp, Saccharomyces cerevisiae
atgaagaaaaattcttcggtagttttcttccttgtgggtctatcacaattcgtcactatggcgtttctcattatcggatccattacggctccaattttcaaacaaataggctattctaaatatgatgagatcacatacggtacattcggctactgtaaagagggctcctgctcaaaagcaagttataattatcaccccgatgagctatcagacagtgatagcaactggaaactcaatagcaacgctaggtctatattggggaaaatcatctttatcacacccattgctgctggtcttaattttttgggatttctttgtaccatcatgagcgttttattaattaacgtgctatccagtgatagagttggtagtgcgtctgccatcatgttttttgttaatttgacattttccactctaggctttctttctgcttctttgatatgtatcgtggtatttttactgttttacccacatgtaacctggtgttcatgggtcctgataccaggagctgctttatctctactagtaattcctttgatattctcagcttattcaagaagctcaggctcaagggatgatgacgaaaccgaggaactggaagaaaagggcatgctgctgaatgacccatatctaagttcgaagtccgggagattcgatatcgacgctgatagtgaggccaacctccgtggtgattcaagaacgaatttattgggtgacaattttaagaacggtactaatatcactgttgtcccagatattatttcacacaatcaagatccgaaattatcaaacataaccacttctaccacgtctgatatttctactttcgataaagaagcaaaggacatggaaaattcaaatggttccggacttaatgaagaagaggacgatggcatggcctatgacaaaaggaggtcaacttcaacgtattctgtcattgaaagtgaaagtggcttgaaaaatgggagtgtttctaataattatgtgagaaacaatggtagtaacaccagcaacaatataaactataaagttccgctaggaaaaacggaaatatcatccagtgcatcattagcgtcctcagactactctcaaagagaggtcataccgcacagaaatccttcgagactactaaacgacatcatggagacctccttcaatgaaccaaacgatagccacatcaacagcatgtcctcctacaacgataaagattcaacgttgacttcaatatcacagagaggtgtcaatccggaagtatacaatcaaatgcctcgagaaacagccgctggtcctgcaaatataaggccgtacgctggtcagccacacccggcgccattagtgtatccccaacaacgactacaaccacaacaacagcaaccacagcagcaatatcatcaatacaatttatatcaaagaactactcctgctggtccagatccttctaatgttattttacaaagcaatccttatttcaacgttgccccaaaccaagtgccacagcacagaaatccggtaccaggcgtcggttttgctccgaatcctttaccaaaccaaagcccgataacacaaggatataagcctgcctataagaggagaatgcaaaacaaaaacttgccccgagctactacttcactgaacaatccttacggatttaggtaa

SEQ ID NO: 10098 - DNA, 1656 bp, Artificial Sequence
  Description of Artificial Sequence: Synthetic polynucleotide
atgaagaaaaattcttctgtagttttcttccttgtgggtttatctcaattcgtcactatggcgtttctcattatcggatccattacggctccaattttcaaacaaataggctattctaaatatgatgagatcacatacggtacattcggctactgtaaagagggctcctgctccaaagcaagttataattatcaccccgatgagttaagtgacagtgatagcaactggaaactcaatagcaacgctaggtctatattggggaaaatcatctttatcacacccattgctgctggtcttaattttttgggatttctttgtaccatcatgagcgttttattaattaacgtgttatccagtgatagagttggtagtgcgtctgccatcatgttttttgttaatttgacattttccactttgggctttctttctgcttctttgatatgtatcgtggtatttttacttttttacccacatgtaacctggtgttcttgggtcttgataccaggagctgctttatctttattggtaattcctttgatattcagtgcttattctagaagcagtggctccagggatgatgacgaaaccgaggaattggaagaaaagggcatgttattgaatgacccatatttgagttccaagtccgggagattcgatatcgacgctgatagtgaggccaacctccgtggtgattccagaacgaatttattgggtgacaattttaagaacggtactaatatcactgttgtcccagatattatttctcacaatcaagatccgaaattatctaacataaccacttctaccacgtctgatatttctactttcgataaagaagcaaaggacatggaaaatagtaatggttccggacttaatgaagaagaggacgatggcatggcctatgacaaaaggaggtctacttccacgtattctgtcattgaaagtgaaagtggcttgaaaaatgggagtgtttctaataattatgtgagaaacaatggtagtaacaccagcaacaatataaactataaagttccgttgggaaaaacggaaatatcttccagtgcatctttagcgtccagtgactactctcaaagagaggtcataccgcacagaaatccttccagattattaaacgacatcatggagacctccttcaatgaaccaaacgatagccacatcaacagcatgtcctcctacaacgataaagattctacgttgacttccatatctcagagaggtgtcaatccggaagtatacaatcaaatgcctagagaaacagccgctggtcctgcaaatataaggccgtacgctggtcagccacacccggcgccattagtgtatccccaacaaagattacaaccacaacaacagcaaccacagcagcaatatcatcaatacaatttatatcaaagaactactcctgctggtccagatccttctaatgttattttacaaagcaatccttatttcaacgttgccccaaaccaagtgccacagcacagaaatccggtaccaggcgtcggttttgctccgaatcctttaccaaaccaaagcccgataacacaaggatataagcctgcctataagaggagaatgcaaaacaaaaacttgcccagggctactacttctttgaacaatccttacggatttaggtga

SEQ ID NO: 10099 - DNA, 1194 bp, Saccharomyces cerevisiae
atgtttagagatagaactaatttatttttatcataccgtaggactttccctcataacataactttctcatctgggaaagcacccttgggcgatgatcaagatattgaaatgggtacatacccgatgatgaatatgtctcacgatatatcggccagattgacagatgaacgaaaaaacaagcatgagaatcacagtgatgcgttaccacccatatttattgatatagcgcaggatgttgatgattatcttctggaggtgagacggttaagtgagcagttggcgaaggtttataggaagaattcgttacctggctttgaagacaagagtcatgatgaggcgctgattgaagatctaagtttcaaagtaattcagatgctgcagaaatgttacgctgttatgaaacgattaaagaccatatacaactctcaatttgtggatggtaagcaattaagtcgagaagagctgattatactagataatctacagaagatctatgcagaaaagatacaaactgaaagtaataagttcagagtattacaaaataattacttgaaattcttgaacaaggatgatttgaaacctatccgcaataaggccagtgcagagaacacgctattattagatgatgaggaagaggaggcagcaagagagaagagagagggcctcgatattgaagactattcaaaaaggacgttgcagagacagcaacagcttcatgacacttctgcagaagcatatttgagagaacgtgacgaagaaattactcagttggcaaggggtgtattagaagtgagcactattttcagggaaatgcaagatttggttgttgaccaggggactattgtggacaggattgattataatctggaaaatacagtggtagagctaaaaagtgcagataaagagttgaataaagcaacacactaccagaagagaactcaaaaatgtaaagtcattttattactaacattgtgcgtaatagcgctctttttctttgttatgttgaaaccacatggcggtggcagtggtggtcgtaataatggtagcaacaagtacaacaatgatgataataaaacagttaataacagtcatgatgacggcagtaatacccatattaatgacgaagagagcaacttgccgagtatcgttgaagtaacagaatctgagaatgatgctttggatgacctactttga

SEQ ID NO: 10100 - DNA, 1194 bp, Artificial Sequence
  Description of Artificial Sequence: Synthetic polynucleotide
atgtttagagatagaactaatttatttttatcttaccgtaggactttccctcataacataactttcagttctgggaaagcacccttgggcgatgatcaagatattgaaatgggtacatacccgatgatgaatatgtctcacgatatatctgccagattgacagatgaaagaaaaaacaagcatgagaatcacagtgatgcgttaccacccatatttattgatatagcgcaggatgttgatgattatcttttggaggtgagaagattaagtgagcagttggcgaaggtttataggaagaattctttacctggctttgaagacaagagtcatgatgaggcgttaattgaagatttgagtttcaaagtaattcagatgttacagaaatgttacgctgttatgaaaagattaaagaccatatacaactctcaatttgtggatggtaagcaattaagtagagaagagttgattatattggataatttacagaagatctatgcagaaaagatacaaactgaaagtaataagttcagagtattacaaaataattacttgaaattcttgaacaaggatgatttgaaacctatccgcaataaggccagtgcagagaacacgttattattagatgatgaggaagaggaggcagcaagagagaagagagagggcctcgatattgaagactattctaaaaggacgttgcagagacagcaacagcttcatgacacttctgcagaagcatatttgagagaacgtgacgaagaaattactcagttggcaaggggtgtattagaagtgagcactattttcagggaaatgcaagatttggttgttgaccaggggactattgtggacaggattgattataatttggaaaatacagtggtagagttgaaaagtgcagataaagagttgaataaagcaacacactaccagaagagaactcaaaaatgtaaagtcattttattattaacattgtgcgtaatagcgctctttttctttgttatgttgaaaccacatggcggtggcagtggtggtcgtaataatggtagcaacaagtacaacaatgatgataataaaacagttaataacagtcatgatgacggcagtaatacccatattaatgacgaagagagcaacttgccgagtatcgttgaagtaacagaatctgagaatgatgctttggatgacttactttga

SEQ ID NO: 10101 - DNA, 2145 bp, Saccharomyces cerevisiae
atgacagaaattattgatttagacttggtcgatgactttatcaagaaacctatggtcaaacaacagaaaaaccagtcttcaaagcctagggtaaaaagaaggggtcagttgacctttgatgatttcagaaacatcaaaattgtagaagaacctgttgtactttctcacaatagttcaattgacgaatcactggatgctgctacccaaaatactaaaaagcgggagaaatatgaaggtacctgtgatgaagaaatgaaaactaaagaaatggaggcaaatatggcaagcaaatattctaatatcaaaacacattcgaacgacactaacaaggtagagtcgatcagtgaacacactacttctaataatagaccattgaatacattaaactggtcaccaaatattcctttacgatattctgactttgcaaagtttatgagtgatgagacggtaacggaaagcaattgggcgcctcccctttgcacccctctcccatatgcaggcgatgttatgaagatcctttcttttatcgtcaaatttaaatgggtgttcagcgacgatctactgaacctgtcatttcaagatgtggagataggactagaattaaaggtggctggccattctgcgaagaatattcgaatttgtcaggataaaatgaatctactattttgcagtcttttgaggttattattctgctccgagaaaagagcagacaaccaaactcatagaaatttcacgctaaaaagatttcttagtttgaaaaatccatatggaaaactggttggcaaactcagaagcttaatccaggagtggggcttaccaaaagaatggcgtggtaatagtgatattttatctactctaaattttaatggaggtggtttgttgacgatggaaccattagatagaataatattattgagatgcatgatcgattggaattgtagctactccgcacttttccataatgaaattcaaaggctcactcacttgaaaggcgatacagggttcaaccatcaaacttttcacgccagcaggtttgctatgtgcggggccaataacatattagatagttgtgaagttttatgctctttgatgagtcaaaagttggaaaatcgaaagaaaaggaagcccagcgacaaaggaaaactgagtaagatcaatagtcagatgaaatttctaaagggtgttcggaaatcattgagcgaaaaagtaactacagacagattacgagctgcagttaaaataaatgaagaatggggtgaatattttgcaaacgaatttacacacacaccaattgatgatcccaccgtagacgaaatttacaagttaaggacatcagagtttatgatagcgagaattccacgagttggagatttctacttaccaccattctggattggcaacgaatgcagttcagtaaacactagttacagtttcaatgacatgtcaacttatcttaattacttcgtaaaattcaaagaggagggtacaaaaatactgcctgcaaaaaccgcacaaaatgaaaacaagtgtcaacttaaacttatatataggaacactcctgcatgtatccgtaatttacagttcaatgatgttcactttgccgaggtgccgcattggtttgaagttgcaggagactcgaattctttgagcaacttcattgagtatttggaaagtttatcatcacttactgaaaatgacaccgatgatacaaaaaagggtatagacaatctaattgagtttttgaaaattttcagtatattcataaatgagactattcagcgcataactgctgcccctacaggcagtactgaaggacgtcatttgcgaacaagctctcagagaagaaccacggtgcattactcgagtgatgtaaatggtgacgtttccgaggaaagtgaaaatgaagttgacattgacgttagcgatgactatgattcagaatatctgagtgaggagaatacattgacaagaaaaggtgaagataggacagataaatcttttgggaaaagagaattacacaatggcgctaaagattgtgataggaattgtgatgatatagagatcttctcagaacccgttaggcaactacaagataattctcgggaaaaaagaagcttgaggcgtaatgccagaaaaggtctatag

SEQ ID NO: 10102 - DNA, 2145 bp, Artificial Sequence
  Description of Artificial Sequence: Synthetic polynucleotide
atgacagaaattattgatttagacttggtcgatgactttatcaagaaacctatggtcaaacaacagaaaaaccagtcttccaagcctagggtaaaaagaaggggtcagttgacctttgatgatttcagaaacatcaaaattgtagaagaacctgttgtactttctcacaatagttctattgacgaatctttagatgctgctacccaaaatactaaaaagagagagaaatatgaaggtacctgtgatgaagaaatgaaaactaaagaaatggaggcaaatatggcaagcaaatattctaatatcaaaacacattccaacgacactaacaaggtagagagtatcagtgaacacactacttctaataatagaccattgaatacattaaactggtctccaaatattcctttaagatattctgactttgcaaagtttatgagtgatgagacggtaacggaaagcaattgggcgcctcccctttgcacccctctcccatatgcaggcgatgttatgaagatcctttcttttatcgtcaaatttaaatgggtgttcagcgacgatttattaaacttatcttttcaagatgtggagataggattagaattaaaggtggctggccattctgcgaagaatattagaatttgtcaggataaaatgaatttacttttttgcagtcttttgaggttattattctgctccgagaaaagagcagacaaccaaactcatagaaatttcacgttgaaaagatttcttagtttgaaaaatccatatggaaaattggttggcaaactcagaagcttaatccaggagtggggcttaccaaaagaatggcgtggtaatagtgatattttatctactttgaattttaatggaggtggtttgttgacgatggaaccattagatagaataatattattgagatgcatgatcgattggaattgtagctactccgcacttttccataatgaaattcaaaggctcactcacttgaaaggcgatacagggttcaaccatcaaacttttcacgccagcaggtttgctatgtgcggggccaataacatattagatagttgtgaagttttatgctctttgatgagtcaaaagttggaaaatagaaagaaaaggaagcccagcgacaaaggaaaattaagtaagatcaatagtcagatgaaatttttgaagggtgttagaaaatctttgagcgaaaaagtaactacagacagattaagagctgcagttaaaataaatgaagaatggggtgaatattttgcaaacgaatttacacacacaccaattgatgatcccaccgtagacgaaatttacaagttaaggacaagtgagtttatgatagcgagaattccaagagttggagatttctacttaccaccattctggattggcaacgaatgcagttctgtaaacactagttacagtttcaatgacatgtctacttatcttaattacttcgtaaaattcaaagaggagggtacaaaaatattacctgcaaaaaccgcacaaaatgaaaacaagtgtcaacttaaacttatatataggaacactcctgcatgtatccgtaatttacagttcaatgatgttcactttgccgaggtgccgcattggtttgaagttgcaggagactctaattctttgagcaacttcattgagtatttggaaagtttatcttctcttactgaaaatgacaccgatgatacaaaaaagggtatagacaatttaattgagtttttgaaaattttcagtatattcataaatgagactattcagcgcataactgctgcccctacaggcagtactgaaggacgtcatttgagaacaagctctcagagaagaaccacggtgcattactctagtgatgtaaatggtgacgtttccgaggaaagtgaaaatgaagttgacattgacgttagcgatgactatgattctgaatatttgagtgaggagaatacattgacaagaaaaggtgaagataggacagataaatcttttgggaaaagagaattacacaatggcgctaaagattgtgataggaattgtgatgatatagagatcttctctgaacccgttaggcaattacaagataattctagagaaaaaagaagcttgaggcgtaatgccagaaaaggtttatga

SEQ ID NO: 10103 - DNA, 1344 bp, Saccharomyces cerevisiae
atgcccaaggagtcagaggtcataaattctgaatttcatgtagatgtccaagatccagagcgtctaaacggccaccctgtagcaaaatttatcaataaattaagcggtcaacctgaatcttacgtcaacaggactaattatattttcggtcgaacactgggtgccggttccttcggtgttgtgagacaagccagaaagttgtccacaaatgaagatgttgctataaagatcttattgaagaaggcattgcagggaaacaatgtgcaattacagatgctgtacgaagagctgtccattcttcaaaaattgagtcatccgaacattgtgtcattcaaggattggtttgaatcgaaggataagttctatattgtcactcagctggcaacaggaggtgaattatttgatagaattctgtctagagggaagttcacagaagtggatgctgttgaaatcatagttcagattcttggtgccgtggagtatatgcattccaagaatgttgttcatagggatttgaaacctgagaacgttttgtatgttgataagtcagaaaattcgcctctggtaattgcggacttcggtatagctaaacaattgaagggggaggaggatttgatatacaaagcagccggatcgttgggttatgtggcaccagaagtcctcacacaagatggacatggtaagccttgtgatatatggtccattggtgtgatcacatatactttactgtgcggttattctccttttattgccgaaagcgttgaaggattcatggaggaatgtacagcttcgagatacccggtaaccttccatatgccatattgggataacatatctattgatgttaagcgtttcatcttgaaggcattgagattgaatccagctgacagaccaactgctacggaattgctggacgatccatggattacttcaaagagagttgaaactagtaatattttaccagacgttaagaaagggttttctttgcgtaagaaattacgtgacgctattgaaattgtgaagcttaataatagaattaagaggttaagaaatatgtattcattaggggacgatggcgataacgatatagaagagaattccctcaatgaaagtcttctggacggcgtcacacattcgttggatgatttacgtctgcaatctcagaagaaagggggagaactaacagaagagcaaatgaaattgaagtctgcattaacaaaggatgcctttgttcaaattgtcaaagctgcaacaaagaataaacataaagttttggctggtgaagaggaagacgatagcaagaaaacactgcatgatgatcgggagtcgaagtcagaagactaa

SEQ ID NO: 10104 - DNA, 1344 bp, Artificial Sequence
  Description of Artificial Sequence: Synthetic polynucleotide
atgcccaaggagagtgaggtcataaattctgaatttcatgtagatgtccaagatccagagcgtttgaacggccaccctgtagcaaaatttatcaataaattaagcggtcaacctgaatcttacgtcaacaggactaattatattttcggtagaacattaggtgccggttccttcggtgttgtgagacaagccagaaagttgtccacaaatgaagatgttgctataaagatcttattgaagaaggcattgcagggaaacaatgtgcaattacagatgctttacgaagagctttccattcttcaaaaattgagtcatccgaacattgtgtctttcaaggattggtttgaatccaaggataagttctatattgtcactcagttagcaacaggaggtgaattatttgatagaattttatctagagggaagttcacagaagtggatgctgttgaaatcatagttcagattcttggtgccgtggagtatatgcattccaagaatgttgttcatagggatttgaaacctgagaacgttttgtatgttgataagtctgaaaattctcctttggtaattgcggacttcggtatagctaaacaattgaagggggaggaggatttgatatacaaagcagccggatctttgggttatgtggcaccagaagtcctcacacaagatggacatggtaagccttgtgatatatggtccattggtgtgatcacatatactttattatgcggttattctccttttattgccgaaagcgttgaaggattcatggaggaatgtacagcttccagatacccggtaaccttccatatgccatattgggataacatatctattgatgttaagcgtttcatcttgaaggcattgagattgaatccagctgacagaccaactgctacggaattgttggacgatccatggattacttctaagagagttgaaactagtaatattttaccagacgttaagaaagggttttctttgcgtaagaaattacgtgacgctattgaaattgtgaagcttaataatagaattaagaggttaagaaatatgtattctttaggggacgatggcgataacgatatagaagagaattccctcaatgaaagtcttttggacggcgtcacacattctttggatgatttacgtttacaatctcagaagaaagggggagaattaacagaagagcaaatgaaattgaagtctgcattaacaaaggatgcctttgttcaaattgtcaaagctgcaacaaagaataaacataaagttttggctggtgaagaggaagacgatagcaagaaaacattgcatgatgatagagagtctaagtctgaagactga

SEQ ID NO: 10105 - DNA, 1761 bp, Saccharomyces cerevisiae
atgttcattgaatactctagattaccaggcttcgaaagcatcaatatatcattttctagaggcatgctaagattggctaaatttactaatttcgctacatacaaacaaaaattagagtacttcaggctgttggcaggttcaaacaaatacatccaacgaatcagcgttgctgactttgagagacatccagatgaaatcaattatatttacattatactaatatccattctccaaatggaagagtgtatgccagtcctagttctatgtccaactgtttattgggtacgattccactggcctggaaaatgttccgtgaacagtttgaactttacgaatgaaacgttaaaaagcgctttccatgctgtcttcactccctattttgcactaatgaaaaaagttcttggaaggattaaaaacaacatgttgctatttgcagaacctcatgcaaatttaaataatttgtttgtcaagcatttccacgatctcatatataagagcgtaaaggatgaaaaaaccggcgaggcaattctgtatttgagaactaacgttaatgttccaaatgtttttattgacgataaaagagcagtttttcatggtgacggtatgaaaattggaaaatttaccggcaaatttttatgcttttccttcaaacgaacaataagatggtcaaaattagattcagtggattcttttgcggttacgacagtaaattatagagtatctgtaaattgggaaaagacaccaagaaagactttcctttctctagacagtgacaccaaaaatttacactatatatcgaaaaagatattgaataaaaagggaaagaacgccactacatcaaaaacaacaaaaagttcatgcacaagtgagaacgtttgcgatgataaaacattctccgtcgaattcccacttacaacgtcagcaaaaactgaatatttgttgagaagtaatttttctttagaaaaaattaatgaaagcaacaatcctacccttcaagaacttactttaaaccgtacacatcgcttataccgatcaaattttcgcaatgaacaaagcaccacacagaggaagtttgaaaaaatcggtagaactgtctctactgattcaggcaataaactgcttacgtttccggaacaaaaggccacaagagatagtaaccccttctcaatcgaattgacacatgcaacagtaatttccagcgacgaaagtgccttaaaagacactactaatcaagcgatagccgaaatgcaacgtataactcctgctattgcaaagacaatctcgagaagaacagcaaattgggtctgctcaaacccagctcctgatccgtatggggaaccttcaacgtggtccagaattttgacccctaatttgaaaataatatcggaatcatcaccatattatccagtccatctagcttcaccaaattctacctttagtagagatcaaagtgtaagaagtgttgtcatgaggagaagttctgtatgtgttgaaaaacaaaatagtttcttcagaaattacgaacatttcaaaaatatattgtcgagaagaactattaaggttaagacatcatgtcctaggctgagcgttgacgtaagtgacaacaaaagagaaaatttatcacaagaacacctcattttaccgaacaaatctagagaaaaagtcaaccgatttaaaaattgcctacatagagttgcagaagcgctcagagctgccaaagaaaactgggatcagcacaatcccaggaactctattcattaa

SEQ ID NO: 10106 - DNA, 1761 bp, Artificial Sequence
  Description of Artificial Sequence: Synthetic polynucleotide
atgttcattgaatactctagattaccaggcttcgaaagcatcaatatatccttttctagaggcatgttgagattggctaaatttactaatttcgctacatacaaacaaaaattagagtacttcaggttattggcaggttccaacaaatacatccaaagaatcagcgttgctgactttgagagacatccagatgaaatcaattatatttacattatattaatatccattctccaaatggaagagtgtatgccagtcttggttttatgtccaactgtttattgggtaagattccactggcctggaaaatgttccgtgaacagtttgaactttacgaatgaaacgttaaaaagcgctttccatgctgtcttcactccctattttgcattaatgaaaaaagttcttggaaggattaaaaacaacatgttgttatttgcagaacctcatgcaaatttaaataatttgtttgtcaagcatttccacgatctcatatataagagcgtaaaggatgaaaaaaccggcgaggcaattctttatttgagaactaacgttaatgttccaaatgtttttattgacgataaaagagcagtttttcatggtgacggtatgaaaattggaaaatttaccggcaaatttttatgcttttccttcaaaagaacaataagatggtccaaattagattctgtggattcttttgcggttacgacagtaaattatagagtatctgtaaattgggaaaagacaccaagaaagactttcctttctttggacagtgacaccaaaaatttacactatatatccaaaaagatattgaataaaaagggaaagaacgccactacaagtaaaacaacaaaaagttcctgcacaagtgagaacgtttgcgatgataaaacattctccgtcgaattcccacttacaacgtctgcaaaaactgaatatttgttgagaagtaatttttctttagaaaaaattaatgaaagcaacaatcctacccttcaagaacttactttaaaccgtacacatcgcttatacaggtctaattttcgcaatgaacaaagcaccacacagaggaagtttgaaaaaatcggtagaactgtctctactgattctggcaataaattacttacgtttccggaacaaaaggccacaagagatagtaaccccttctccatcgaattgacacatgcaacagtaatttccagcgacgaaagtgccttaaaagacactactaatcaagcgatagccgaaatgcaacgtataactcctgctattgcaaagacaatctccagaagaacagcaaattgggtctgcagcaacccagctcctgatccgtatggggaaccttctacgtggtccagaattttgacccctaatttgaaaataatatctgaatcttctccatattatccagtccatttggcttctccaaattctacctttagtagagatcaaagtgtaagaagtgttgtcatgaggagaagttctgtatgtgttgaaaaacaaaatagtttcttcagaaattacgaacatttcaaaaatatattgtccagaagaactattaaggttaagacatcttgtcctaggttgagcgttgacgtaagtgacaacaaaagagaaaatttatctcaagaacacctcattttaccgaacaaatctagagaaaaagtcaacagatttaaaaattgcttgcatagagttgcagaagcgctcagagctgccaaagaaaactgggatcagcacaatcccaggaactctattcattga

SEQ ID NO: 10107 - DNA, 375 bp, Saccharomyces cerevisiae
atgcgaccacatcattttttttgtggtaacatgggagtgatgtatacggccatgtctggatacgaaacagaagacgcacaagcctactgggcatgcggtagagcatatgaatcagcttttgcaacgttgactaaaaaggttccaggaaccacattctcagctgatatgccaacatctacttggcatggtgtcctggattgcggctattcctcttcaattaacgtggcagaaaataaaagttcgcccatcgattattggaattgtggtagaacatatgccaggaattatgctctgtccgatgcgctttcactgaagccaacgaatatgttacagtactttctattagtattattttttatctgcattatactatga

SEQ ID NO: 10108 - DNA, 375 bp, Artificial Sequence
  Description of Artificial Sequence: Synthetic polynucleotide
atgagaccacatcattttttttgtggtaacatgggagtgatgtatacggccatgtctggatacgaaacagaagacgcacaagcctactgggcatgcggtagagcatatgaatctgcttttgcaacgttgactaaaaaggttccaggaaccacattcagtgctgatatgccaacatctacttggcatggtgtcttggattgcggctattcctcttccattaacgtggcagaaaataaaagttctcccatcgattattggaattgtggtagaacatatgccaggaattatgctttgtccgatgcgctttctttgaagccaacgaatatgttacagtactttttattagtattattttttatctgcattatattatga

SEQ ID NO: 10109 - DNA, 192 bp, Saccharomyces cerevisiae
atgatgtgtattataaattctgagtcttttcatggttctcagaaaagatcgggcgtgtggtctagtggtatgattctcgctttgggcgacttcctgattaacagggggacaaagcatgcgagaggccctgggttcaattcccagctcgcccccttttttactattgaaaagtattcggtcagacgtagctga

SEQ ID NO: 10110 - DNA, 192 bp, Artificial Sequence
  Description of Artificial Sequence: Synthetic polynucleotide
atgatgtgtattataaattctgagtcttttcatggttctcagaaaagaagcggcgtgtggtctagtggtatgattctcgctttgggcgacttcttgattaacagggggacaaagcatgcgagaggccctgggttcaattcccagctcgcccccttttttactattgaaaagtattctgtcagacgtagctga

SEQ ID NO: 10111 - DNA, 1656 bp, Saccharomyces cerevisiae
atggtgccagaaaatagaaggaaacagttggcaatttttgtagttgtcacatatttgctcacattttattgcgtgtattcagccaccaagacaagcgtttcctttttgcaagtaacactgaagctaaatgaaggcttcaatctaatggttttgtcgatattcatcttattaaattctaccttactatggcaactcctaacgaaactattatttggtgaactgaggcttattgagcatgagcacatttttgaaaggttaccatttaccattataaacaccttgtttatgtcctcactgttccacgaacggtattttttcacagtggcattttttggactattactactctatctgaaagttttccattggattttaaaggataggctggaggccttattacagtcaataaatgattccaccacaatgaaaacccttatctttagtagattctcatttaacctcgtactattggcggttgtagactaccagataataacacgatgcatctcctccatatatacaaaccaaaagagtgatattgaatccacatccctttacctgatacaagtaatggagtttaccatgcttttgattgatttgctaaatttattcctacagacttgtttgaatttctgggaattttatcgctcacaacaaagtctgtctaatgagaacaaccatattgtccatggcgatcctacagatgaaaacacggttgagtctgatcaatctcagccagtgctgaatgacgacgacgatgacgacgatgatgatagacaatttaccggcctggagggtaaattcatgtatgaaaaagcaattgacgtattcacaagattcttaaaaacggcacttcatttgtctatgctaataccatttaggatgcctatgatgcttttgaaagatgtggtgtgggatatcttggcactatatcaaagtggcacaagtttgtggaaaatctggagaaataacaaacagctcgacgacactcttgtcactgtcaccgtagaacagctacaaaattctgcaaatgatgacaatatttgtatcatttgtatggatgagttaatacattctccaaaccagcagacgtggaagaataaaaacaagaaacccaaaaggttaccttgtggccacatacttcatttgtcgtgtttaaagaattggatggaacgttctcagacttgtcctatttgtagattgcctgtctttgatgaaaaaggtaatgttgtgcaaacgactttcacttccaatagtgatatcacgacacagaccaccgtaacagatagcactgggatagcgacagatcaacaaggtttcgcaaacgaagtagatctacttcccacaagaacaacttcccctgatataaggatagtgcctactcaaaatatagacacattagcaatgagaacaaggtcaacctctacaccatctcctacgtggtatacgttcccattacataaaactggtgataattctgttgggtcaagccgatcagcctacgaatttttgatcacaaattcagatgagaaagaaaatggtattcctgtcaaattaacaatagaaaatcacgaagtaaattctctgcatggagacgggggcgagcaaattgccaagaaaattgtcataccagataaatttatccagcatatctag

SEQ ID NO: 10112 - DNA, 1656 bp, Artificial Sequence
  Description of Artificial Sequence: Synthetic polynucleotide
atggtgccagaaaatagaaggaaacagttggcaatttttgtagttgtcacatatttgctcacattttattgcgtgtattctgccaccaagacaagcgtttcctttttgcaagtaacattgaagttgaatgaaggcttcaatttaatggttttgagcatattcatcttattaaattctaccttattatggcaactcttgacgaaattattatttggtgaattgaggcttattgagcatgagcacatttttgaaaggttaccatttaccattataaacaccttgtttatgtcctctttattccacgaaagatattttttcacagtggcattttttggattattacttctctatttgaaagttttccattggattttaaaggataggttagaggccttattacagagtataaatgattccaccacaatgaaaacccttatctttagtagattctcctttaacctcgtacttttggcggttgtagactaccagataataacaaggtgcatctcctccatatatacaaaccaaaagagtgatattgaatccacatccctttacttgatacaagtaatggagtttaccatgcttttgattgatttgttgaatttattcttacagacttgtttgaatttctgggaattttatcgctctcaacaaagtttatctaatgagaacaaccatattgtccatggcgatcctacagatgaaaacacggttgagtctgatcaatctcagccagtgttgaatgacgacgacgatgacgacgatgatgatagacaatttaccggcttagagggtaaattcatgtatgaaaaagcaattgacgtattcacaagattcttaaaaacggcacttcatttgtctatgttgataccatttaggatgcctatgatgcttttgaaagatgtggtgtgggatatcttggcattatatcaaagtggcacaagtttgtggaaaatctggagaaataacaaacagctcgacgacactcttgtcactgtcaccgtagaacagttacaaaattctgcaaatgatgacaatatttgtatcatttgtatggatgagttaatacattctccaaaccagcagacgtggaagaataaaaacaagaaacccaaaaggttaccttgtggccacatacttcatttgagttgtttaaagaattggatggaacgttctcagacttgtcctatttgtagattgcctgtctttgatgaaaaaggtaatgttgtgcaaacgactttcacttccaatagtgatatcacgacacagaccaccgtaacagatagcactgggatagcgacagatcaacaaggtttcgcaaacgaagtagatttacttcccacaagaacaacttcccctgatataaggatagtgcctactcaaaatatagacacattagcaatgagaacaaggtctacctctacaccatctcctacgtggtatacgttcccattacataaaactggtgataattctgttgggtccagcagatctgcctacgaatttttgatcacaaattctgatgagaaagaaaatggtattcctgtcaaattaacaatagaaaatcacgaagtaaattctttgcatggagacgggggcgagcaaattgccaagaaaattgtcataccagataaatttatccagcatatctga

SEQ ID NO: 10113 - DNA, 405 bp, Saccharomyces cerevisiae
atgtcaggaaaagctcatggaggtaaaggtaaatccggcgctaaagacagtggttcattgagatctcaatcttcttcagcaagggctggcttgcagtttcctgtcggtaggattaagcgttacctgaaaaggcacgctaccggccgaacaagagtaggatccaaagctgccatttatttgactgctgtgttggaatatttgactgctgaagtgctggagttggctggtaatgcagccaaggatcttaaagtcaagaggattaccccaagacatctgcaattggccattagaggtgacgatgagttagattctttgatcagggctacaattgcttcaggtggtgttttgcctcatataaataaagcattattattgaaagtggaaaaaaagggaagtaagaaataa

SEQ ID NO: 10114 - DNA, 405 bp, Artificial Sequence
  Description of Artificial Sequence: Synthetic polynucleotide
atgtctggaaaagctcatggaggtaaaggtaaatccggcgctaaagacagtggttctttgagatctcaatcttcttctgcaagggctggcttgcagtttcctgtcggtaggattaagcgttacttgaaaaggcacgctaccggcagaacaagagtaggatccaaagctgccatttatttgactgctgtgttggaatatttgactgctgaagtgttggagttggctggtaatgcagccaaggatcttaaagtcaagaggattaccccaagacatttacaattggccattagaggtgacgatgagttagattctttgatcagggctacaattgcttctggtggtgttttgcctcatataaataaagcattattattgaaagtggaaaaaaagggaagtaagaaatga

SEQ ID NO: 10115 - DNA, 2061 bp, Saccharomyces cerevisiae
atgatacgtccattatgttcaaaaattattatcagttacatattcgcaatttctcagtttctactggccgctaatgcgtggtcgcccacagatagttatgttcctggcaccgtgtcgtgtcccgatgacataaatctggtaagagaggctacgtctatatctcagaatgagagcgcatggttggaaaagaggaataaagtcactagtgtagctttaaaagatttcttgactagggctactgcaaatttttcagatagctcagaagttttgtcgaagctatttaatgatggcaacagcgaaaacctgccgaaaattgctgtcgccgtttcaggtgggggctatcggtccatgctaacaggtgcgggtgttctagcagcaatggataacagaactgaaggtgcttatgagcatgggctgggtggacttttacaaagcacaacatatttatctggtgcctcgggcggcaactggctagttggtacattagccttgaacaattggacatccgtgcaagacattcttaataatatgcagaacgacgattctatttgggatttgtcagattctattgttacccccggcggcattaatatattcaaaacagccaaaaggtgggatcatatctctaatgctgtcgaatctaagcagaacgccgattacaatacttctttggccgatatttggggcagagccttggcgtataattttttcccttctctaaatagagggggtataggcctgacttggtcttccattagggatttcccagtgtttcaaaatgctgaaatgccttttccaatttctgttgcggacggtaggtatcctggaacaaaagtcatcaatttgaacgcaacggtttttgaatttaatccctttgaaatgggatcctgggatccctctttgaactcttttgccaacgttaagtaccttggaacgaatgtctccaatggtgtaccattggaaaggggaaaatgtaccgcaggctttgataatgcaggttttatcatgggtacttcctccaccttatttaaccagtttcttttgagaataaactccactcacttacctagtttcatcacaagattagcaagacattttctaaaggatttatctcaagattttaatgatatcgctgtttacagtcctaatccatttaaagacacgaagtttttggatagtgactatacgacaagtattgttgattcagacagcctattcttagttgacggcggtgaagacgacgaaaatgttcctgtgttaccgcttatacaaaaggaacgtgatgtggacattatttttgcggtagataattctgccgatatgagattggcttggcctgacggttcttctttagtccatacctatgagcgtcaattcgttaagcaaggtcaaggtatgtccttcccatatgttccagatacgaatacattcgttaatttgggtttgaacaagaaaccaaccttcttcggttgcgatgctaataatttgaccgatcttcaatatattccacctctagttgtttatctgccaaatgcagaatactctttcaatagtaatcagagcgcgttcaagctatcatattccgaatcccaaagaagaagtatgattcaaaacgggtttgaaattgcaactaggaacaacttcactgatgatcctgaattcatgggctgcgtcggctgcgccatcattagacgtaagcaacaagctttgaatattactttgcctccggaatgtgaaacctgttttaaaaattattgctggaatggtaccctggatactaccccattaccagatgttgaaaaggatgttcaccactcctttatcaacgtcaatagcttcaacagctccataggacaagaagaaagtctttacgccggatcttcagcttcccagtcatcgtcttcatcatcgtcttcatcttcgtcttcggaaattccttcggctactgcaacccttgagaaaaaggcagctactaattctggatcacatttatctggcataagtgtaaagttctctgctatgattatgcttactttattgatgtttaccggagcagtataa

SEQ ID NO: 10116 - DNA, 2061 bp, Artificial Sequence
  Description of Artificial Sequence: Synthetic polynucleotide
atgatacgtccattatgttctaaaattattatcagttacatattcgcaatttctcagtttttattagccgctaatgcgtggtcccccacagatagttatgttcctggcaccgtgagctgtcccgatgacataaatttggtaagagaggctacgtctatatctcagaatgagagcgcatggttggaaaagaggaataaagtcactagtgtagctttaaaagatttcttgactagggctactgcaaatttttctgatagctctgaagttttgtccaagttatttaatgatggcaacagcgaaaacttaccgaaaattgctgtcgccgtttctggtgggggctatagatccatgttaacaggtgcgggtgttttagcagcaatggataacagaactgaaggtgcttatgagcatgggttaggtggacttttacaaagcacaacatatttatctggtgcctctggcggcaactggttagttggtacattagccttgaacaattggacatccgtgcaagacattcttaataatatgcagaacgacgattctatttgggatttgagtgattctattgttacccccggcggcattaatatattcaaaacagccaaaaggtgggatcatatctctaatgctgtcgaatctaagcagaacgccgattacaatacttctttggccgatatttggggcagagccttggcgtataattttttcccttctttgaatagagggggtataggcttaacttggtcttccattagggatttcccagtgtttcaaaatgctgaaatgccttttccaatttctgttgcggacggtaggtatcctggaacaaaagtcatcaatttgaacgcaacggtttttgaatttaatccctttgaaatgggatcctgggatccctctttgaactcttttgccaacgttaagtaccttggaacgaatgtctccaatggtgtaccattggaaaggggaaaatgtaccgcaggctttgataatgcaggttttatcatgggtacttcctccaccttatttaaccagtttcttttgagaataaactccactcacttacctagtttcatcacaagattagcaagacattttttgaaggatttatctcaagattttaatgatatcgctgtttacagtcctaatccatttaaagacacgaagtttttggatagtgactatacgacaagtattgttgattctgacagcttattcttagttgacggcggtgaagacgacgaaaatgttcctgtgttaccgcttatacaaaaggaacgtgatgtggacattatttttgcggtagataattctgccgatatgagattggcttggcctgacggttcttctttagtccatacctatgagcgtcaattcgttaagcaaggtcaaggtatgtccttcccatatgttccagatacgaatacattcgttaatttgggtttgaacaagaaaccaaccttcttcggttgcgatgctaataatttgaccgatcttcaatatattccacctttggttgtttatttaccaaatgcagaatactctttcaatagtaatcagagcgcgttcaagttatcttattccgaatcccaaagaagaagtatgattcaaaacgggtttgaaattgcaactaggaacaacttcactgatgatcctgaattcatgggctgcgtcggctgcgccatcattagacgtaagcaacaagctttgaatattactttgcctccggaatgtgaaacctgttttaaaaattattgctggaatggtaccttggatactaccccattaccagatgttgaaaaggatgttcaccactcctttatcaacgtcaatagcttcaacagctccataggacaagaagaaagtctttacgccggatcttctgcttcccagtcttcttcttcttcttcttcttcttcttcttcttctgaaattccttctgctactgcaacccttgagaaaaaggcagctactaattctggatctcatttatctggcataagtgtaaagttctctgctatgattatgcttactttattgatgtttaccggagcagtatga

SEQ ID NO: 10117 - DNA, 1104 bp, Saccharomyces cerevisiae
atgtcatcttccgcccccaaatacaccactttccaagggtcacaaaattttaggttacggatcgtcttggcaacattatcagggaaaccaataaaaattgaaaaaatccgttcaggcgacttaaatcccggtctgaaagattatgaagtgtcttttctaaggctgatcgagtcggtcaccaacgggagtgtaattgaaatttcttataccggtactactgtgatttataggcccggtatcatagttggtggtgcatcaactcatatctgccctagttccaaaccggtaggttatttcgtcgaaccaatgctatatttggctccattttcaaaaaagaaattttctatattattcaaaggcataactgcatctcacaacgatgccggtattgaagctatcaaatggggactcatgcccgttatggaaaaatttggcgttagagagtgcgccctacatactttgaaaagaggttcaccaccactaggaggtggcgaagtgcatttggttgttgattctttgattgcgcaacctataactatgcatgaaatagataggcccataatttcatcgattaccggtgtagcatactctaccagagtaagtccgtcgcttgtgaatagaatgatcgatggtgctaagaaggtattgaaaaatctgcaatgcgaagttaacataacggcagatgtctggagaggtgaaaattcagggaagagtccaggctggggtattactttggttgctcagtccaagcagaaaggttggagttattttgcagaagatatcggtgatgcaggttctatacctgaagaacttggtgaaaaagttgcctgtcaattattagaagaaatatcaaagagtgcagcagttggtagaaaccagcttccattagcaattgtttacatggtcatcgggaaagaagatatcggcagattgagaattaataaggaacagatagacgaaagattcataatcctcttgagagatattaagaagatctttaatactgaagtctttttaaaaccagttgacgaggcggataatgaagacatgatagctactatcaagggtattggtttcacaaacacaagcaaaaagattgcatag

SEQ ID NO: 10118 - DNA, 1104 bp, Artificial Sequence
  Description of Artificial Sequence: Synthetic polynucleotide
atgtcttcttccgcccccaaatacaccactttccaagggagccaaaattttaggttaagaatcgtcttggcaacattaagtgggaaaccaataaaaattgaaaaaatccgtagcggcgacttaaatcccggtttgaaagattatgaagtgtcttttttaaggttgatcgagtctgtcaccaacgggagtgtaattgaaatttcttataccggtactactgtgatttataggcccggtatcatagttggtggtgcatctactcatatctgccctagttccaaaccggtaggttatttcgtcgaaccaatgctttatttggctccattttccaaaaagaaattttctatattattcaaaggcataactgcatctcacaacgatgccggtattgaagctatcaaatggggactcatgcccgttatggaaaaatttggcgttagagagtgcgccttgcatactttgaaaagaggttctccaccattaggaggtggcgaagtgcatttggttgttgattctttgattgcgcaacctataactatgcatgaaatagataggcccataatttcttccattaccggtgtagcatactctaccagagtaagtccgagtcttgtgaatagaatgatcgatggtgctaagaaggtattgaaaaatttacaatgcgaagttaacataacggcagatgtctggagaggtgaaaatagtgggaagagtccaggctggggtattactttggttgctcagtccaagcagaaaggttggagttattttgcagaagatatcggtgatgcaggttctatacctgaagaacttggtgaaaaagttgcctgtcaattattagaagaaatatccaagagtgcagcagttggtagaaaccagcttccattagcaattgtttacatggtcatcgggaaagaagatatcggcagattgagaattaataaggaacagatagacgaaagattcataatcctcttgagagatattaagaagatctttaatactgaagtctttttaaaaccagttgacgaggcggataatgaagacatgatagctactatcaagggtattggtttcacaaacacaagcaaaaagattgcatga

SEQ ID NO: 10119 - DNA, 816 bp, Saccharomyces cerevisiae
atgtcttttgatattaattggagtacattggaatctgacaatagactgaatgatcttataagaaaacatttaaattcatatttacaaaatacgcaactaccaagctacgtaagtaatcttagggtactagattttgatctgggaaaagttggtcctgctataacactgaaagaaataacagatcccctagatgagttttatgattcaattagagaggaggctgatcaagagacggaggaaaataatgacaacaaggaggacagcgaacatatttgtcctgatcgtactatagctaatcatgaaggacctaaagatgattttgaggcgcctgtggtgatgccatcccccaacgatatacaatttttactagaggtcgagtacaagggtgacttactcgttacgattggtgccgaccttgtgctgaattatcccgtagaaaaatttatgactttgccagtaaaactttctatcagtgatatcggtctccattccctttgcattgttgcatgtttatcaaagcaactatttcttagctttctgtgtgatgttagtgatcctgcactggatgacaaccaaactgttttagatcctaaggggccaattctggcagctactaagccattggagcgaatatccattgtgagaagtatgaagattgaaaccgaaataggggaacaatatcagggacagggctcagtattaagaagtgttggagaactagaacagtttttgtttacgatattcaaagattttttaagaaaggagttagcatggccaagttggattaatctggatttcaacgatggtgatgagtaa

SEQ ID NO: 10120 - DNA, 816 bp, Artificial Sequence
  Description of Artificial Sequence: Synthetic polynucleotide
atgtcttttgatattaattggagtacattggaatctgacaatagattgaatgatcttataagaaaacatttaaattcttatttacaaaatacgcaattaccaagctacgtaagtaatcttagggtattggattttgatttgggaaaagttggtcctgctataacattaaaagaaataacagatcccttagatgagttttatgattctattagagaggaggctgatcaagagacggaggaaaataatgacaacaaggaggacagcgaacatatttgtcctgatcgtactatagctaatcatgaaggacctaaagatgattttgaggcgcctgtggtgatgccatcccccaacgatatacaatttttattggaggtcgagtacaagggtgacttactcgttacgattggtgccgaccttgtgttgaattatcccgtagaaaaatttatgactttgccagtaaaactttctatcagtgatatcggtctccattccctttgcattgttgcatgtttatccaagcaattatttcttagctttttatgtgatgttagtgatcctgcattggatgacaaccaaactgttttagatcctaaggggccaattttggcagctactaagccattggagagaatatccattgtgagaagtatgaagattgaaaccgaaataggggaacaatatcagggacagggctctgtattaagaagtgttggagaattggaacagtttttgtttacgatattcaaagattttttaagaaaggagttagcatggccaagttggattaatttggatttcaacgatggtgatgagtga

SEQ ID NO: 10121 - DNA, 624 bp, Saccharomyces cerevisiae
atggttttgataataaggccctcacagacattgatattattcaggaaagcgatgctcaagccaattgggagatatcctcttaaaagaaatttttttggtttgagcggtaccaatcacactattagggaacagcgatatgttttgcgcaaggccataaacgcccctccaagcacagtctacgctgcagtgtcagaagttgcccaatataaggaatttattccttattgtgttgattcgtttgtagataaacgaaatcctgtggataacaagcctctcattgcggggcttcgagttggtttcaaacaatacgatgaggaatttatatgcaatgttacctgtaaagatactgatcatacgtataccgttgttgcagaaacaatatctcataatttgtttcaccttttgatttcgaaatggaccataatgcctcacccaaatagaccaaatgcggccatggtagaacttctattaagatttaaattcaaatctcggatatataacagtgtctctctaatatttgcgaaaactgtgactgaattggtgatgaacgcatttgccaaaagagcataccatttagtaagattagcaatgctaaaaccttcttctaaagaaggctctccgtga

SEQ ID NO: 10122 - DNA, 624 bp, Artificial Sequence
  Description of Artificial Sequence: Synthetic polynucleotide
atggttttgataataaggccctctcagacattgatattattcaggaaagcgatgctcaagccaattgggagatatcctcttaaaagaaatttttttggtttgagcggtaccaatcacactattagggaacagagatatgttttgcgcaaggccataaacgcccctccaagcacagtctacgctgcagtgtctgaagttgcccaatataaggaatttattccttattgtgttgattcttttgtagataaaagaaatcctgtggataacaagcctctcattgcggggcttcgtgttggtttcaaacaatacgatgaggaatttatatgcaatgttacctgtaaagatactgatcatacgtataccgttgttgcagaaacaatatctcataatttgtttcaccttttgatttccaaatggaccataatgcctcacccaaatagaccaaatgcggccatggtagaacttttattaagatttaaattcaaatctagaatatataacagtgtctctttgatatttgcgaaaactgtgactgaattggtgatgaacgcatttgccaaaagagcataccatttagtaagattagcaatgttgaaaccttcttctaaagaaggctctccgtga

SEQ ID NO: 10123 - DNA, 1026 bp, Saccharomyces cerevisiae
atgagactgccagaaatctccatttggaaagtgatactactacttcatttgtttgctctacaagaatttcaacttgtctccgctgcaaatttgccctctttatcaagtagtacaaaggcagcagatagttctagtaaaggcagctcttcagccaagacaaccacgtccttaggcaaaagctcagtaaccagtaaggatgtttcgtcaagtcataatgtcacttcaagcactaaaatgcccaaaatcaccacgagcgctagtacaagcttatacaccaactctagtttatggagcaacaacagtgtaatatcaacttcatctattacaccttccagcgtttatatcccggttacggacggaaataaattcttatatcaggctcatcatcctaacggtactgtgttcattgcatttgctggctgtttaggtgcaattctactatcactgacgggtgcatggattgcattgaatataaagtcatggcgaagtgctagaaaggaaaataagctgagaaatctagaaaatcaataccaacacgatcctttctacttccaaacaaacattaatgacgacgaaagtgaaacatcttcccattctgacgacagtgacatatcagaaaaagttctgaaaaataactcatctcgtatgagtttgtatactctaggatccacttctgttttgaatcttttgaacaataaaacagatgccaacgataacttcagatcatctatgtttatttcacccaccgaaattctgcaatctgatgccaacaactctaatacatggtctcaaagcaatgagagtgctatatatgattccttgtccagtactccaagggaacctggtgctacccaaatactgggaaagtttacagacagcactaatccattcaattatacatcatacaatttaagtcccgactctgaagaccgctctactccaaaatcaaatgttagtcagggtaaagtaaagaagtaccgtcctcccagtgttcatctggatcaactgctcgacggtaaggaataa

SEQ ID NO: 10124 - DNA, 1026 bp, Artificial Sequence
  Description of Artificial Sequence: Synthetic polynucleotide
atgagattaccagaaatctccatttggaaagtgatattattacttcatttgtttgctttacaagaatttcaacttgtctccgctgcaaatttgccctctttatccagtagtacaaaggcagcagatagttctagtaaaggcagctcttctgccaagacaaccacgtccttaggcaaaagctctgtaaccagtaaggatgtttcttccagtcataatgtcacttccagcactaaaatgcccaaaatcaccacgagcgctagtacaagcttatacaccaactctagtttatggagcaacaacagtgtaatatctacttcttctattacaccttccagcgtttatatcccggttacggacggaaataaattcttatatcaggctcatcatcctaacggtactgtgttcattgcatttgctggctgtttaggtgcaattttattatctttgacgggtgcatggattgcattgaatataaagtcttggagaagtgctagaaaggaaaataagttgagaaatttggaaaatcaataccaacacgatcctttctacttccaaacaaacattaatgacgacgaaagtgaaacatcttcccattctgacgacagtgacatatctgaaaaagttttgaaaaataactcttctcgtatgagtttgtatactttgggatccacttctgttttgaatcttttgaacaataaaacagatgccaacgataacttcagatcttctatgtttatttctcccaccgaaattttacaatctgatgccaacaactctaatacatggtctcaaagcaatgagagtgctatatatgattccttgtccagtactccaagggaacctggtgctacccaaatattaggaaagtttacagacagcactaatccattcaattatacatcttacaatttaagtcccgactctgaagaccgctctactccaaaatctaatgttagtcagggtaaagtaaagaagtaccgtcctcccagtgttcatttggatcaattgctcgacggtaaggaatga

SEQ ID NO: 10125 - DNA, 2310 bp, Saccharomyces cerevisiae
atgactattgctgatgcttccaaagttaatcatgagttgtcttctgatgacgatgacgatgtgccattatctcaaactttaaaaaaaagaaaggtggcgtccatgaactctgcctctcttcaagacgaagcggaaccttatgatagtgatgaggcaatctctaagatttccaagaaaaagactaagaaaataaagaccgaaccagtgcaatcgtcgtcattaccatcgcctccagcaaagaaaagcgcgacatcaaagcctaaaaaaatcaagaaagaagatggtgatgtaaaggtaaaaacaactaaaaaggaagaacaggagaacgaaaaaaagaaacgagaagaagaagaagaggaggacaagaaagcgaaggaggaggaggaagaatataaatggtgggaaaaagaaaacgaagatgacaccataaaatgggtcacactgaagcataacggtgttatattccctccaccataccagcccttaccatctcacatcaaattatattacgatgggaagccagtagatttacctccgcaagctgaagaagtagccgggttctttgctgccctattagagagtgatcatgccaaaaatcctgttttccaaaagaacttcttcaatgatttcttgcaagtactgaaagaaagtggtggtcccctcaatggaattgagataaaggaattttctcgttgcgatttcaccaaaatgtttgattacttccagttacaaaaagaacagaaaaagcaactgacttcccaagaaaagaaacagattcgtttggaaagagaaaaattcgaggaagattataaattctgtgaattagatggcagaagggaacaagtagggaatttcaaggttgaacctcctgatctatttagaggtcgtggcgctcacccaaaaacaggcaaattgaagagaagagtgaatcctgaggatatcgttttaaatctaagtaaagacgcacccgttccgccagccccagaagggcacaagtggggtgaaatcagacacgacaataccgttcaatggttagccatgtggagagagaatattttcaactcattcaaatacgtcagattggcagcgaactcttcattgaagggtcaaagtgactacaagaagtttgaaaaggcgagacaattgaaatcctatatcgatgccatcagaagggattacacgagaaatttgaaaagcaaagttatgctagagcgccaaaaggccgtagccatttatttgatcgatgtattcgctttaagagccggtggtgaaaaatccgaagatgaagccgatactgtgggttgttgttcattgcgatatgagcatgttactttgaaacctccgaatactgttatctttgatttcttaggtaaggattctattagattttatcaagaggtagaagttgacaaacaagttttcaaaaatttgacaatttttaaaaggccgcccaaacagccaggacatcaactgtttgatcgtctagatccatctatactgaacaaatatctacaaaactacatgccgggattgactgctaaagttttccgtacatataatgcttccaaaacaatgcaagatcaactggatctaattccaaataaaggatctgtcgcagagaaaatattgaagtacaacgcagcaaatagaactgtagccatcctatgtaaccatcaaaggactgtcacgaaggggcatgcacaaacagtggaaaaggccaataatagaatacaagagttggaatggcaaaagattcgttgcaagagggccattttacaattggataaggatcttttaaagaaagagccaaaatatttcgaagaaatcgacgatttgacgaaagaagatgaagccaccattcacaagagaattattgatagagaaattgaaaaatatcagcgaaaatttgttagggagaacgataagaggaaatttgaaaaggaagaattattgccggaaagtcaattgaaggaatggttggagaaagtcgacgaaaagaaacaagaattcgaaaaggaattgaaaaccggtgaagtggaactgaaatcaagttggaattcagtcgaaaaaataaaagcacaagtagagaaattagaacagcgtatccaaactagttccattcagttgaaagataaagaggaaaactcccaggtttcactgggcacttccaaaatcaattatatagaccctagactttctgtggtattttgcaaaaagtatgatgttccgattgaaaagatttttacaaaaaccctaagagaaaaattcaaatgggccatagaatcggtagatgaaaattggaggttttaa

SEQ ID NO: 10126 - DNA, 2310 bp, Artificial Sequence
  Description of Artificial Sequence: Synthetic polynucleotide
atgactattgctgatgcttccaaagttaatcatgagttgtcttctgatgacgatgacgatgtgccattatctcaaactttaaaaaaaagaaaggtggcgtccatgaactctgcctctcttcaagacgaagcggaaccttatgatagtgatgaggcaatctctaagatttccaagaaaaagactaagaaaataaagaccgaaccagtgcaatcttcttctttaccatctcctccagcaaagaaaagcgcgacatccaagcctaaaaaaatcaagaaagaagatggtgatgtaaaggtaaaaacaactaaaaaggaagaacaggagaacgaaaaaaagaaaagagaagaagaagaagaggaggacaagaaagcgaaggaggaggaggaagaatataaatggtgggaaaaagaaaacgaagatgacaccataaaatgggtcacattgaagcataacggtgttatattccctccaccataccagcccttaccatctcacatcaaattatattacgatgggaagccagtagatttacctccgcaagctgaagaagtagccgggttctttgctgccttattagagagtgatcatgccaaaaatcctgttttccaaaagaacttcttcaatgatttcttgcaagtattgaaagaaagtggtggtcccctcaatggaattgagataaaggaattttctcgttgcgatttcaccaaaatgtttgattacttccagttacaaaaagaacagaaaaagcaattgacttcccaagaaaagaaacagattcgtttggaaagagaaaaattcgaggaagattataaattctgtgaattagatggcagaagggaacaagtagggaatttcaaggttgaacctcctgatttatttagaggtcgtggcgctcacccaaaaacaggcaaattgaagagaagagtgaatcctgaggatatcgttttaaatttgagtaaagacgcacccgttccgccagccccagaagggcacaagtggggtgaaatcagacacgacaataccgttcaatggttagccatgtggagagagaatattttcaactctttcaaatacgtcagattggcagcgaactcttctttgaagggtcaaagtgactacaagaagtttgaaaaggcgagacaattgaaatcctatatcgatgccatcagaagggattacacgagaaatttgaaaagcaaagttatgttagagcgccaaaaggccgtagccatttatttgatcgatgtattcgctttaagagccggtggtgaaaaatccgaagatgaagccgatactgtgggttgttgttctttgagatatgagcatgttactttgaaacctccgaatactgttatctttgatttcttaggtaaggattctattagattttatcaagaggtagaagttgacaaacaagttttcaaaaatttgacaatttttaaaaggccgcccaaacagccaggacatcaattatttgatcgtttggatccatctatattaaacaaatatttacaaaactacatgccgggattgactgctaaagttttccgtacatataatgcttccaaaacaatgcaagatcaattggatttgattccaaataaaggatctgtcgcagagaaaatattgaagtacaacgcagcaaatagaactgtagccatcttgtgtaaccatcaaaggactgtcacgaaggggcatgcacaaacagtggaaaaggccaataatagaatacaagagttggaatggcaaaagattcgttgcaagagggccattttacaattggataaggatcttttaaagaaagagccaaaatatttcgaagaaatcgacgatttgacgaaagaagatgaagccaccattcacaagagaattattgatagagaaattgaaaaatatcagagaaaatttgttagggagaacgataagaggaaatttgaaaaggaagaattattgccggaaagtcaattgaaggaatggttggagaaagtcgacgaaaagaaacaagaattcgaaaaggaattgaaaaccggtgaagtggaattgaaatctagttggaattctgtcgaaaaaataaaagcacaagtagagaaattagaacagcgtatccaaactagttccattcagttgaaagataaagaggaaaactcccaggtttctttaggcacttccaaaatcaattatatagaccctagactttctgtggtattttgcaaaaagtatgatgttccgattgaaaagatttttacaaaaaccttgagagaaaaattcaaatgggccatagaaagtgtagatgaaaattggaggttttga

SEQ ID NO: 10127 - DNA, 363 bp, Saccharomyces cerevisiae
atgaatgctccagacagattcgaactgttccttctgggtgaaggggaatccaagctaaagattgaccccgacaccaaagcccccaacgcagtagtgataacgtttgagaaggaggaccacacgttgggaaacctgattcgtgcagaacttctgaacgacagaaaagtgctgtttgccgcttacaaggttgagcatcccttcttcgctcgtttcaagctgagaatacagaccaccgagggctacgacccgaaggatgccttgaaaaacgcctgtaacagcatcattaacaagcttggcgccctgaagacaaatttcgaaaccgagtggaacctgcaaactctagccgccgacgacgcattttga

SEQ ID NO: 10128 - DNA, 363 bp, Artificial Sequence
  Description of Artificial Sequence: Synthetic polynucleotide
atgaatgctccagacagattcgaattattccttttgggtgaaggggaatccaagttgaagattgaccccgacaccaaagcccccaacgcagtagtgataacgtttgagaaggaggaccacacgttgggaaacttgattcgtgcagaacttttgaacgacagaaaagtgctttttgccgcttacaaggttgagcatcccttcttcgctcgtttcaagttgagaatacagaccaccgagggctacgacccgaaggatgccttgaaaaacgcctgtaacagcatcattaacaagcttggcgccttgaagacaaatttcgaaaccgagtggaacttacaaactttggccgccgacgacgcattttga

SEQ ID NO: 10129 - DNA, 4611 bp, Saccharomyces cerevisiae
atgtcacaggtttggcataattcgaattcgcaatcaaacgatgtggctacttcaaatgacgctacgggttccaacgaaagaaacgaaaaagaaccgtccctccagggaaataagcccggttttgttcaacagcagcaacggattactttaccctcgctatctgccttgagtactaaggaggaagatagaagagattccaatggccaacaggctctaacttctcatgctgctcacatattaggttatcctcccccacattcaaatgctatgccctcaattgcaactgattcagcattgaaacagccccacgagtatcaccctcgccctaaatcttcgtcctcttctccctctataaacgcttcgcttatgaatgctggtccagctcccctccccacagtgggagccgccagtttttctttgtcgagatttgacaatccattaccgataaaagctcctgttcatacagaggaaccaaaaagttataatggtcttcaggaagaagaaaaggcgacgcaacggcctcaagattgcaaggaagttcccgctggtgtgcagcctgctgatgcccctgaccctagcagcaaccatgcagatgctaacgatgacaataataacaacgaaaattctcacgatgaagatgctgactacagacctctaaacgtgaaggatgccctatcttacctcgaacaggtcaaatttcaatttagttcgcgtccggatatctataatttatttttagatattatgaaggactttaaatctcaggcaatagacacaccgggcgttattgaaagagtatccactttgttcagaggttatccaattttgattcaagggttcaatacttttctaccccaaggctatagaatcgaatgctcctctaatccggacgaccccattagagttactacaccaatgggtactacgacagtaaacaataacatcagtccatctggtagaggtacaacggatgcacaggaacttggttcttttccagaaagcgatggaaatggtgttcaacagccctccaatgtgccaatggtgccttcgagtgtgtatcaatcggaacaaaaccaagaccaacaacaatctttgcctcttttagctacttcttctggtttaccttcaattcaacaacctgaaatgcctgcacatcgccaaatcccacaaagtcaatctttagtgcctcaagaagatgctaagaaaaacgttgatgtcgaatttagtcaagccataagctacgttaataaaattaaaactagatttgccgaccaacctgatatttacaagcattttctggaaatactacaaacttatcagcgagagcaaaagccaataaacgaagtctacgcacaagtgacgcatcttttccaaaatgctcctgatttactagaagatttcaagaaattcttgccggactcttcagcttctgccaatcagcaggtgcaacatgctcagcaacatgctcaacaacaacatgaggcccaaatgcatgcacaggcacaagctcaggctcaggcacaggcacaggtggaacaacagaagcagcaacagcaattcttgtatccagcttcgggctattacggccatccttctaaccgaggtattccacagcaaaacttgcctcctataggaagcttctcgcctccaacaaacggttcgaccgtacatgaagcctatcaggatcaacagcacatgcaaccaccccacttcatgcccttaccatcgatcgttcaacacgggccaaatatggtacatcaagggatagcgaatgaaaatccacctctatcagatctaagaacgtctctcactgaacagtacgctccttctagtatacaacatcagcagcagcacccgcaaagtattagtcctatagcaaatacgcagtatggtgatatccctgttagaccggaaattgatttagatcctagcattgtgcctgtggtccctgaacccactgagcccatcgaaaacaatatatcgcttaatgaggaagtcactttcttcgaaaaggccaagaggtatatcggcaataaacatttatacactgagtttttgaaaattttaaatttgtactctcaagatatacttgatcttgacgatttagtggaaaaggtagatttctacttgggttccaataaagaactatttacgtggttcaaaaactttgttggctaccaagaaaaaaccaaatgtatcgagaatattgttcatgaaaaacatagattggatttagatttatgtgaggcatttggcccaagttacaagaggctaccaaaaagtgacactttcatgccatgctcaggtagggatgatatgtgttgggaagtcttgaacgatgaatgggttggacatcctgtatgggcttccgaagattcgggatttattgctcatcgtaaaaaccagtatgaggaaacactattcaagatcgaagaggaaagacatgagtatgatttttacattgaatcaaatttaagaactattcaatgtttggaaacaattgtaaataagatcgagaacatgactgagaatgaaaaagccaattttaaactgcctccaggtcttggccatacttcaatgactatttataaaaaagtgataaggaaagtttatgataaggaaagggggttcgagattattgatgctttgcatgagcaccctgcagtgacagccccagtcgttctgaaaaggttaaagcaaaaagacgaagaatggagaagagctcaacgtgaatggaataaagtttggagggagttagaacagaaggtttttttcaagtcattagatcatttaggcttaacatttaaacaggctgacaagaaattattaactacaaagcagttgatatcagagattagcagcatcaaagttgatcaaacaaacaaaaaaattcactggttaactcctaaaccaaagagccagttagattttgatttccctgataaaaacattttctatgatatcttgtgtttggctgacacttttataacccataccacagcctattctaatcccgataaagaaagattgaaagatttactaaaatacttcatctctttgtttttttctatttctttcgaaaaaatcgaagaatcgttgtactcccataagcaaaacgtgtcagaatctagcggatctgacgatggcagttctattgcatcaaggaagaggccctatcaacaagaaatgagtttacttgatattttacacaggagcagatatcaaaagctaaagcgttctaatgatgaagatggcaaagttccccagctctctgaaccacccgaagaagaacctaataccattgaggaggaagagctcatcgatgaagaagctaaaaatccgtggctaactgggaatttagtggaggaagcaaactctcagggtattatccaaaatcgcagtatttttaatctattcgctaatacgaatatttacatatttttccgtcattggacaacgatttatgagcggcttttggaaattaagcaaatgaatgaaagggtcacaaaggaaatcaacacaaggtcgacagttacttttgccaaagatctagatttattatcgagtcaactttccgaaatgggactagattttgttggtgaagacgcgtacaaacaggttttaagactgagtagaaggttgattaatggggatcttgaacatcagtggtttgaagagagtttgcggcaagcttacaataacaaagcgtttaaactctatacaattgataaagtcacccaatcgttggtaaagcatgctcataccttgatgactgacgctaaaactgcggaaataatggctttgttcgttaaagatagaaatgcctccaccacgagtgcgaaggaccaaattatctatcgcttgcaggtgcgctcacatatgtccaacacagaaaatatgtttagaatagagtttgataaaagaactctgcatgtttccattcaatatattgcacttgatgatttgacactaaaggaaccaaaggcagacgaagataaatggaaatattatgtaacatcgtatgctctgccacatccaacagaaggcattccgcacgagaaactgaagataccatttttggaaaggctcatcgaatttggacaagatattgatggaacagaggtagatgaggagttttcccccgaaggcatctctgtatcgacattgaaaattaagatccagcctataacctaccaactgcatattgaaaacgggtcttacgatgtttttacccgtaaggctactaacaaatatcctactattgctaatgataatactcaaaaaggaatggtttctcagaagaaggagttgatatcaaaatttctagactgtgcagttggtttgagaaataatttagatgaggctcaaaaattaagtatgcaaaaaaaatgggagaacctaaaagacagcatagcaaagacgagtgctggaaaccagggaatagagagtgaaaccgaaaaaggtaaaattacgaaacaggagcagtcggataatttggacagctctactgcaagtgtactgcctgcatccattactactgtaccacaagatgataatatagaaacgactgggaatactgaatcttcagacaagggggctaagattcaataa

SEQ ID NO: 10130 - DNA, 4611 bp, Artificial Sequence
  Description of Artificial Sequence: Synthetic polynucleotide
atgtctcaggtttggcataatagtaattctcaaagtaacgatgtggctacttccaatgacgctacgggttccaacgaaagaaacgaaaaagaaccgtccctccagggaaataagcccggttttgttcaacagcagcaaagaattactttaccctctttatctgccttgagtactaaggaggaagatagaagagattccaatggccaacaggctttgacttctcatgctgctcacatattaggttatcctcccccacattctaatgctatgccctctattgcaactgattctgcattgaaacagccccacgagtatcaccctcgccctaaatcttcttcctcttctccctctataaacgcttctcttatgaatgctggtccagctcccctccccacagtgggagccgccagtttttctttgtccagatttgacaatccattaccgataaaagctcctgttcatacagaggaaccaaaaagttataatggtcttcaggaagaagaaaaggcgacgcaaagacctcaagattgcaaggaagttcccgctggtgtgcagcctgctgatgcccctgaccctagcagcaaccatgcagatgctaacgatgacaataataacaacgaaaattctcacgatgaagatgctgactacagacctttgaacgtgaaggatgccttatcttacctcgaacaggtcaaatttcaatttagttctcgtccggatatctataatttatttttagatattatgaaggactttaaatctcaggcaatagacacaccgggcgttattgaaagagtatccactttgttcagaggttatccaattttgattcaagggttcaatacttttttgccccaaggctatagaatcgaatgctcctctaatccggacgaccccattagagttactacaccaatgggtactacgacagtaaacaataacatcagtccatctggtagaggtacaacggatgcacaggaacttggttcttttccagaaagcgatggaaatggtgttcaacagccctccaatgtgccaatggtgccttctagtgtgtatcaaagtgaacaaaaccaagaccaacaacaatctttgcctcttttagctacttcttctggtttaccttctattcaacaacctgaaatgcctgcacatcgccaaatcccacaaagtcaatctttagtgcctcaagaagatgctaagaaaaacgttgatgtcgaatttagtcaagccataagctacgttaataaaattaaaactagatttgccgaccaacctgatatttacaagcattttttggaaatattgcaaacttatcagagagagcaaaagccaataaacgaagtctacgcacaagtgacgcatcttttccaaaatgctcctgatttattggaagatttcaagaaattcttgccggactcttctgcttctgccaatcagcaggtgcaacatgctcagcaacatgctcaacaacaacatgaggcccaaatgcatgcacaggcacaagctcaggctcaggcacaggcacaggtggaacaacagaagcagcaacagcaattcttgtatccagcttctggctattacggccatccttctaacagaggtattccacagcaaaacttgcctcctataggaagcttcagtcctccaacaaacggttctaccgtacatgaagcctatcaggatcaacagcacatgcaaccaccccacttcatgcccttaccatccatcgttcaacacgggccaaatatggtacatcaagggatagcgaatgaaaatccacctttaagtgatttgagaacgtctctcactgaacagtacgctccttctagtatacaacatcagcagcagcacccgcaaagtattagtcctatagcaaatacgcagtatggtgatatccctgttagaccggaaattgatttagatcctagcattgtgcctgtggtccctgaacccactgagcccatcgaaaacaatatatctcttaatgaggaagtcactttcttcgaaaaggccaagaggtatatcggcaataaacatttatacactgagtttttgaaaattttaaatttgtactctcaagatatacttgatcttgacgatttagtggaaaaggtagatttctacttgggttccaataaagaattatttacgtggttcaaaaactttgttggctaccaagaaaaaaccaaatgtatcgagaatattgttcatgaaaaacatagattggatttagatttatgtgaggcatttggcccaagttacaagaggttaccaaaaagtgacactttcatgccatgctctggtagggatgatatgtgttgggaagtcttgaacgatgaatgggttggacatcctgtatgggcttccgaagattctggatttattgctcatcgtaaaaaccagtatgaggaaacattgttcaagatcgaagaggaaagacatgagtatgatttttacattgaaagtaatttaagaactattcaatgtttggaaacaattgtaaataagatcgagaacatgactgagaatgaaaaagccaattttaaattacctccaggtcttggccatacttctatgactatttataaaaaagtgataaggaaagtttatgataaggaaagggggttcgagattattgatgctttgcatgagcaccctgcagtgacagccccagtcgttttgaaaaggttaaagcaaaaagacgaagaatggagaagagctcaacgtgaatggaataaagtttggagggagttagaacagaaggtttttttcaagtctttagatcatttaggcttaacatttaaacaggctgacaagaaattattaactacaaagcagttgatatctgagattagcagcatcaaagttgatcaaacaaacaaaaaaattcactggttaactcctaaaccaaagagccagttagattttgatttccctgataaaaacattttctatgatatcttgtgtttggctgacacttttataacccataccacagcctattctaatcccgataaagaaagattgaaagatttattgaaatacttcatctctttgtttttttctatttctttcgaaaaaatcgaagaatctttgtactcccataagcaaaacgtgtctgaatctagcggatctgacgatggcagttctattgcaagcaggaagaggccctatcaacaagaaatgagtttacttgatattttacacaggagcagatatcaaaagttgaagcgttctaatgatgaagatggcaaagttccccagctctctgaaccacccgaagaagaacctaataccattgaggaggaagagctcatcgatgaagaagctaaaaatccgtggttgactgggaatttagtggaggaagcaaactctcagggtattatccaaaatcgcagtatttttaatttattcgctaatacgaatatttacatatttttccgtcattggacaacgatttatgagaggcttttggaaattaagcaaatgaatgaaagggtcacaaaggaaatcaacacaaggtctacagttacttttgccaaagatttggatttattatccagtcaactttccgaaatgggattagattttgttggtgaagacgcgtacaaacaggttttaagattaagtagaaggttgattaatggggatcttgaacatcagtggtttgaagagagtttgagacaagcttacaataacaaagcgtttaaactctatacaattgataaagtcacccaatctttggtaaagcatgctcataccttgatgactgacgctaaaactgcggaaataatggctttgttcgttaaagatagaaatgcctccaccacgagtgcgaaggaccaaattatctatcgcttgcaggtgcgctctcatatgtccaacacagaaaatatgtttagaatagagtttgataaaagaactttacatgtttccattcaatatattgcacttgatgatttgacattgaaggaaccaaaggcagacgaagataaatggaaatattatgtaacatcttatgctttgccacatccaacagaaggcattccgcacgagaaattgaagataccatttttggaaaggctcatcgaatttggacaagatattgatggaacagaggtagatgaggagttttcccccgaaggcatctctgtatctacattgaaaattaagatccagcctataacctaccaattgcatattgaaaacgggtcttacgatgtttttacccgtaaggctactaacaaatatcctactattgctaatgataatactcaaaaaggaatggtttctcagaagaaggagttgatatccaaatttttggactgtgcagttggtttgagaaataatttagatgaggctcaaaaattaagtatgcaaaaaaaatgggagaacttgaaagacagcatagcaaagacgagtgctggaaaccagggaatagagagtgaaaccgaaaaaggtaaaattacgaaacaggagcagagcgataatttggacagctctactgcaagtgtattacctgcatccattactactgtaccacaagatgataatatagaaacgactgggaatactgaatcttctgacaagggggctaagattcaatga

SEQ ID NO: 10131 - DNA, 1137 bp, Saccharomyces cerevisiae
atgccagtaaagttaaggtggccttggttaggaattgctataccaacgtttctgatttcatttataggctatggtgcacactactttattttatccaatttcttgtcagttccgaaacaaataacatttgagttctgtttgtcaatgatatggctctcctattacttggccatctgcacaaatccaggaaggcctttgcccaactacaaaccaccccctgatatctggcggaatttctgtaagaagtgccaaagttataagccagaacgttcacatcattgtaaaacctgcaatcaatgcgtcctaatgatggatcatcattgtccgtggacgatgaattgcgtcggctttgcaaactatccgcatttccttagattcttattttggatcatagtgacgactagtgttttattttgcatacaagctaagcggatatattttatttggcaacaaaggcacttgcctggctacttcttcaaaaaatcagaactgattttcttaacaatatcgagtcctttaaattcttttgtcctactaacgataacaattcttttcctacgatgtttattcaatcaaatcttgaatggaagatctcaaattgagtcgtgggatatggatcggctagaatctttgttcaactccggaagattaactcagaaattaattgataatacttggagaatatatccagagtcgaggtcgtttcaaaataaaaaggatgctgaggaacacttgacaaaaaaaaggccacgttttgatgaacttgtaaatttcccttacgattttgatttgtacactaatgcattactgtaccttggtcccattcatttatggttatggccatatggtgttcctacgggagatgggaacaattttccaaaaaacggtatttcaaaatatgaggctaactcctcattggaagaccacatcctttcacttccctggccaccagatggaggtaaaacaaacaccgtcttcaatcatggcagctcaacaatagagatgcgtaatgaaagtggcgaacagctaataaggaccagacttcctcaaaatggcagacatgcttctcgtgagaagtggtacaacgactggggtgaatcactagacgattttggagtggatgttgatatggaatag

SEQ ID NO: 10132 - DNA, 1137 bp, Artificial Sequence
  Description of Artificial Sequence: Synthetic polynucleotide
atgccagtaaagttaaggtggccttggttaggaattgctataccaacgtttttgatttcctttataggctatggtgcacactactttattttatccaatttcttgagtgttccgaaacaaataacatttgagttctgtttgtccatgatatggctctcctattacttggccatctgcacaaatccaggaaggcctttgcccaactacaaaccaccccctgatatctggagaaatttctgtaagaagtgccaaagttataagccagaacgttctcatcattgtaaaacctgcaatcaatgcgtcttgatgatggatcatcattgtccgtggacgatgaattgcgtcggctttgcaaactatccgcatttccttagattcttattttggatcatagtgacgactagtgttttattttgcatacaagctaagagaatatattttatttggcaacaaaggcacttgcctggctacttcttcaaaaaaagtgaattgattttcttaacaatatctagtcctttaaattcttttgtcttgttgacgataacaattcttttcttaagatgtttattcaatcaaatcttgaatggaagatctcaaattgagagttgggatatggatagattagaatctttgttcaactccggaagattaactcagaaattaattgataatacttggagaatatatccagagtccaggtcttttcaaaataaaaaggatgctgaggaacacttgacaaaaaaaaggccacgttttgatgaacttgtaaatttcccttacgattttgatttgtacactaatgcattattgtaccttggtcccattcatttatggttatggccatatggtgttcctacgggagatgggaacaattttccaaaaaacggtatttccaaatatgaggctaactcctctttggaagaccacatcctttctcttccctggccaccagatggaggtaaaacaaacaccgtcttcaatcatggcagctctacaatagagatgcgtaatgaaagtggcgaacagttgataaggaccagacttcctcaaaatggcagacatgcttctcgtgagaagtggtacaacgactggggtgaatctttggacgattttggagtggatgttgatatggaatga

SEQ ID NO: 10133 - DNA, 954 bp, Saccharomyces cerevisiae
atgtcaactttattagaaaggactaagagtgtgcaagagctgaagaagagagctgcagggaaaacatccgcaaatcccgcagaggtcgctaaagctaaaaaagtactaagaaggctatatagttgggatgaaattccggaatggcaaagagacaatgattttattttacatggatacgtgaaagaaactagtagcttcattgaaacttttaaaagtttgttttatttgcataatgaaagtgtcaatatttattcacatttaattcctgctctcgggttcttcactgtactgttgctagataaatctactatcaaagtgtttgcaacaactacatggctagatcatatggtaatcgacctcttttattcgggggcgtttgcatgtttaatattgagtagctcctttcattgtctaaagagtcactccttaagaattgctaccttaggaaataagttggactaccttggtatttgtatattgattgttacgtcaatggtcagtattttgtactacggctattttgagaaattttccctattttgcctatttgcgcttattaccgttagctttgggatcgcgtgtagtattgtgtcactaaaagataagtttcggaaaagagagtggagaccttacagagctgggctatttgtttgttttggtttatcctcaattattccaatattcagcggcctttactgctatagtttttcagaaatttggacccaaattcagctcttttgggtattacttgggggtgtcctatatataattggcgctgttctttatggaatgcggtttcctgaaaagatttgccccggtaaatttgatatttggggtcattctcaccaacttttccattttctagttgttattgcggcattgtgccacttgagaggtttattaaatagttatgagttagtccatataaagatggagaacgggattgtctcctag

SEQ ID NO: 10134 - DNA, 954 bp, Artificial Sequence
  Description of Artificial Sequence: Synthetic polynucleotide
atgtctactttattagaaaggactaagagtgtgcaagagttgaagaagagagctgcagggaaaacatccgcaaatcccgcagaggtcgctaaagctaaaaaagtattaagaaggttatatagttgggatgaaattccggaatggcaaagagacaatgattttattttacatggatacgtgaaagaaactagtagcttcattgaaacttttaaaagtttgttttatttgcataatgaaagtgtcaatatttattctcatttaattcctgctctcgggttcttcactgtacttttgttggataaatctactatcaaagtgtttgcaacaactacatggcttgatcatatggtaatcgacctcttttattctggggcgtttgcatgtttaatattgagtagctcctttcattgtttgaagagtcactccttaagaattgctaccttaggaaataagttggactaccttggtatttgtatattgattgttacgtctatggtcagtattttgtactacggctattttgagaaattttccttattttgcttatttgcgcttattaccgttagctttgggatcgcgtgtagtattgtgtctttgaaagataagtttagaaaaagagagtggagaccttacagagctgggttgtttgtttgttttggtttatccagtattattccaatattcagcggcctttactgctatagtttttctgaaatttggacccaaattcagctcttttgggtattacttgggggtgtcctttatataattggcgctgttctttatggaatgagatttcctgaaaagatttgccccggtaaatttgatatttggggtcattctcaccaacttttccattttttggttgttattgcggcattgtgccacttgagaggtttattaaatagttatgagttagtccatataaagatggagaacgggattgtctcctga

SEQ ID NO: 10135 - DNA, 882 bp, Saccharomyces cerevisiae
atggaaagcacatcaggagaacgttccgaaaatatacatgaggatcaagggataccaaaagtaattctgcccgctgattttaataaatgctctagaactgacctagtggtgctcatatcacgaatgttagtatcgctgatagcaatcaatgaaaattcagcaacaaagaaatctgatgaccaaattactttaacacgataccattctaagattcctccaaacatatcaatcttcaactatttcatacgactgacaaagttttcctctttagaacattgtgtgcttatgacatcactctattatatcgatttattgcaaactgtgtatcctgattttacgcttaattcgttgactgcccataggtttttattaacagccaccacagtcgcaacaaaaggcttatgtgattcgttctcaacaaacgcccattatgcaaaagttggaggagtacgatgtcacgaattgaatatactggagaacgattttttaaagagagtaaactacagaatcattccgcgggatcataacattacgttatgtagtatagagcaaaaacagaaaaagtttgtcatagataaaaacgcattagggtctctcgatttggattcttattcttacgttaatcgtccaaaaagtggatataatgttctagataaatactatcgaagaatagttcagctggtgggttcctttaacgcttcacctgataagagtagaaaggttgattatgttctcccgccaaatattgatatagtgagtgaaagtggctcccaaactactcaactaaaggggtcgtcatcacccaattctcactcttcacaaaagcgatattctgaggcaaaggacgcacatatctataacaagcgatcaaagccagattaa

SEQ ID NO: 10136 - DNA, 882 bp, Artificial Sequence
  Description of Artificial Sequence: Synthetic polynucleotide
atggaaagcacatctggagaacgttccgaaaatatacatgaggatcaagggataccaaaagtaattttgcccgctgattttaataaatgctctagaactgacttggtggtgctcatatctagaatgttagtatctttgatagcaatcaatgaaaattctgcaacaaagaaatctgatgaccaaattactttaacaagataccattctaagattcctccaaacatatccatcttcaactatttcataaggttgacaaagttttcctctttagaacattgtgtgcttatgacatctctctattatatcgatttattgcaaactgtgtatcctgattttacgcttaattctttgactgcccataggtttttattaacagccaccacagtcgcaacaaaaggcttatgtgattctttcagtacaaacgcccattatgcaaaagttggaggagtaagatgtcacgaattgaatatattggagaacgattttttaaagagagtaaactacagaatcattccgagagatcataacattacgttatgtagtatagagcaaaaacagaaaaagtttgtcatagataaaaacgcattagggtctctcgatttggattcttattcttacgttaatcgtccaaaaagtggatataatgttttggataaatactatagaagaatagttcagttggtgggttcctttaacgcttcccctgataagagtagaaaggttgattatgttctcccgccaaatattgatatagtgagtgaaagtggctcccaaactactcaattgaaggggtcttcttctcccaattctcactcttctcaaaagagatattctgaggcaaaggacgcacatatctataacaagagatccaagccagattga

SEQ ID NO: 10137 - DNA, 2202 bp, Saccharomyces cerevisiae
atgacttctgaaaatccggatgtacttttatctagggtgataaatgtggtgagagcagcatcatcgttagccagtcaagatgtagacttttacaagaatttagacaggggatttagtaaagatctgaaatcaaaagcagacaaacttgcggatatggcgaatgaaataatcctctctattgatgagcatcatgaatcatttgaacttaaagaagaggacatttctgacttgtggaacaactttggaaacatcatggataatttgttagaaatgtcagaccattcgctggataagctgaattgtgcaataaactcaaagtcaagaggttccgatcttcagtatttaggcgaattttcaggaaagaatttttctcccaccaaaagagtcgaaaaacctcagttgaaatttaaaagtccaattgataacagcgaaagtcatccgttcatacctttattgaaggaaaaaccaaatgctttgaagccactctctgagagtttgaggttggttgatgatgatgaaaataaccccagtcactacccccatccttatgaatatgagattgatcatcaagagtatagtccagaaattctccaaattagagaggagattccctcaaaatcctgggatgattcggtaccaatttgggtagatacaagtacagaactcgaatcaatgttggaggacttgaaaaatacgaaagagattgccgttgatcttgagcatcacgattataggtcatactatggtattgtttgcctcatgcaaattagtacaagggaaagggattatttagttgatactctaaaacttcgcgaaaatttacatattctgaacgaagtgtttacgaacccttcaattgtgaaagtttttcacggtgcattcatggatattatttggcttcagcgagatttaggtttgtatgtcgttggtctcttcgatacttaccatgcgtctaaagcaatcggtcttcctagacatagtttggcctatcttttggagaattttgccaattttaaaacttcaaagaaatatcagttggctgactggcgtataagaccgctttcaaaacccatgacggcatatgctagagcagatactcactttttactaaatatatatgaccagttgagaaacaaacttatcgagtctaataagttagcaggtgttctttatgaatcaagaaatgtcgcaaaaagaaggtttgaatattcaaagtacagaccactgacaccttcttcagaagtttattctccaatcgaaaaagagagtccttggaaaatattgatgtatcagtacaacataccacctgagagggaagtattagtaagagagctataccaatggagagatcttattgcaagaagagacgatgaatcgccacgatttgttatgccaaaccagttattggctgcacttgtcgcatatacacctactgatgtcataggtgttgtttctttgaccaatggcgtaactgaacatgtccgccagaatgcaaaactattagctaatttgataagagatgcattacgaaacatcaagaacaccaatgaggaagctactcccattccatcttccgagaccaaagcagacggaatattgttggagactataagtgttcctcaaatccgtgatgttatggaaaggttttcggtgttgtgcaacagcaatatttccaagagccgagccaagcctgtcactaattcttctattctgttgggtaagattttaccacgtgaggagcatgatattgcatatagcaaagacggcttgccaaataaagtgaagacggaagatatcaggatccgagcacaaaatttcaagtctgccttagcaaacttggaggatatcatattcgaaatagagaaacctctcgttgttcctgtcaagctagaggagattaagacagtagaccctgcgagcgcacctaatcactcgcctgagattgataatcttgatgatcttgttgttttaaagaagaaaaacattcaaaagaaacaaccagcaaaggaaaaaggtgtaacggaaaaagatgctgtggattattcaaaaattccgaatatcttatctaataagcctggccaaaataatagacaacaaaagaaaaggagattcgacccatcatctagcgatagtaatggaccaagggcagctaaaaagaggaggcctgccgccaaaggtaagaatctgtcatttaaaaggtga

SEQ ID NO: 10138 - DNA, 2202 bp, Artificial Sequence
  Description of Artificial Sequence: Synthetic polynucleotide
atgacttctgaaaatccggatgtacttttatctagggtgataaatgtggtgagagcagcatcttctttagccagtcaagatgtagacttttacaagaatttagacaggggatttagtaaagatttgaaatctaaagcagacaaacttgcggatatggcgaatgaaataatcctctctattgatgagcatcatgaaagttttgaacttaaagaagaggacatttctgacttgtggaacaactttggaaacatcatggataatttgttagaaatgtctgaccattctttagataagttgaattgtgcaataaactccaagtctagaggttccgatcttcagtatttaggcgaattttctggaaagaatttttctcccaccaaaagagtcgaaaaacctcagttgaaatttaaaagtccaattgataacagcgaaagtcatccgttcatacctttattgaaggaaaaaccaaatgctttgaagccactctctgagagtttgaggttggttgatgatgatgaaaataaccccagtcactacccccatccttatgaatatgagattgatcatcaagagtatagtccagaaattctccaaattagagaggagattccctctaaatcctgggatgattctgtaccaatttgggtagatacaagtacagaactcgaaagtatgttggaggacttgaaaaatacgaaagagattgccgttgatcttgagcatcacgattataggtcttactatggtattgtttgcctcatgcaaattagtacaagggaaagggattatttagttgatactttgaaacttcgcgaaaatttacatattttgaacgaagtgtttacgaacccttctattgtgaaagtttttcacggtgcattcatggatattatttggcttcagagagatttaggtttgtatgtcgttggtctcttcgatacttaccatgcgtctaaagcaatcggtcttcctagacatagtttggcctatcttttggagaattttgccaattttaaaacttctaagaaatatcagttggctgactggcgtataagaccgctttctaaacccatgacggcatatgctagagcagatactcactttttattgaatatatatgaccagttgagaaacaaacttatcgagtctaataagttagcaggtgttctttatgaatctagaaatgtcgcaaaaagaaggtttgaatattccaagtacagaccattaacaccttcttctgaagtttattctccaatcgaaaaagagagtccttggaaaatattgatgtatcagtacaacataccacctgagagggaagtattagtaagagagttataccaatggagagatcttattgcaagaagagacgatgaatctccaagatttgttatgccaaaccagttattggctgcacttgtcgcatatacacctactgatgtcataggtgttgtttctttgaccaatggcgtaactgaacatgtccgccagaatgcaaaattattagctaatttgataagagatgcattaagaaacatcaagaacaccaatgaggaagctactcccattccatcttccgagaccaaagcagacggaatattgttggagactataagtgttcctcaaatccgtgatgttatggaaaggttttctgtgttgtgcaacagcaatatttccaagagccgtgccaagcctgtcactaattcttctattttattgggtaagattttaccacgtgaggagcatgatattgcatatagcaaagacggcttgccaaataaagtgaagacggaagatatcaggatcagagcacaaaatttcaagtctgccttagcaaacttggaggatatcatattcgaaatagagaaacctctcgttgttcctgtcaagttggaggagattaagacagtagaccctgcgagcgcacctaatcactctcctgagattgataatcttgatgatcttgttgttttaaagaagaaaaacattcaaaagaaacaaccagcaaaggaaaaaggtgtaacggaaaaagatgctgtggattattctaaaattccgaatatcttatctaataagcctggccaaaataatagacaacaaaagaaaaggagattcgacccatcttctagcgatagtaatggaccaagggcagctaaaaagaggaggcctgccgccaaaggtaagaatttatcttttaaaaggtga

SEQ ID NO: 10139 - DNA, 1635 bp, Saccharomyces cerevisiae
atggccattggcaaaaggttactggtgaacaaaccagcagaagaatcattttatgcttctccaatgtatgattttttgtatccgtttaggccagtggggaaccaatggctgccagaatatattatctttgtatgtgctgtaatactgaggtgcacaattggacttggtccatattctgggaaaggcagtccaccgctgtacggcgattttgaggctcagagacattggatggaaattacgcaacatttaccgctttctaagtggtactggtatgatttgcaatactggggattggactatccaccattaacagcatttcattcgtaccttctgggcctaattggatcttttttcaatccatcttggtttgcactagaaaagtcacgtggctttgaatcccccgataatggcctgaaaacatatatgcgttctactgtcatcattagcgacatattgttttactttcctgcagtaatatactttactaagtggcttggtagatatcgaaaccagtcgcccataggacaatctattgcggcatcagcgattttgttccaaccttcattaatgctcattgaccatgggcactttcaatataattcagtcatgcttggccttactgcttatgccataaataacttattagatgagtattatgctatggcggccgtttgttttgtcctatccatttgttttaaacaaatggcattgtattatgcaccgattttttttgcttatctattaagtcgatcattgctgttccccaaatttaacatagctagattgacggttattgcgtttgcaacactcgcaacttttgctataatatttgcgccattatatttcttgggaggaggattaaagaatattcaccaatgtattcacaggatattcccttttgccaggggcatcttcgaagacaaggttgctaacttctggtgcgttacgaacgtgtttgtaaaatacaaggaaagattcactatacaacaactccagctatattcattgattgccaccgtgattggtttcttaccagccatgataatgacattacttcatcccaaaaagcatcttctcccatacgtgttaatcgcatgttcgatgtccttttttctttttagctttcaagtacatgagaaaactatcctcatcccacttttgcctattacactactctactcctctactgattggaatgttctatctcttgtaagttggataaacaatgtggctttgtttacgctatggcctttgttgaaaaaggacggtcttcatttacagtatgccgtatctttcttactaagcaattggctgattggaaatttcagttttattacaccaaggttcttgccaaaatctttaactcctggcccttctatcagcagcatcaatagcgactatagaagaagaagcttactgccatataatgtggtttggaaaagttttatcataggaacgtatattgctatgggcttttatcatttcttagatcaatttgtagcacctccatcgaaatatccagacttgtgggtgttgttgaactgtgctgttgggttcatttgctttagcatattttggctatggtcttattacaagatattcacttccggtagcaaatccatgaaggacttgtag

SEQ ID NO: 10140 - DNA, 1635 bp, Artificial Sequence
  Description of Artificial Sequence: Synthetic polynucleotide
atggccattggcaaaaggttattggtgaacaaaccagcagaagaaagtttttatgcttctccaatgtatgattttttgtatccgtttaggccagtggggaaccaatggttaccagaatatattatctttgtatgtgctgtaatattaaggtgcacaattggacttggtccatattctgggaaaggcagtccaccgttgtacggcgattttgaggctcagagacattggatggaaattacgcaacatttaccgctttctaagtggtactggtatgatttgcaatactggggattggactatccaccattaacagcatttcattcttaccttttgggcttaattggatcttttttcaatccatcttggtttgcattggaaaagtctcgtggctttgaatcccccgataatggcttgaaaacatatatgcgttctactgtcatcattagcgacatattgttttactttcctgcagtaatatactttactaagtggcttggtagatatagaaaccagtctcccataggacaatctattgcggcaagtgcgattttgttccaaccttctttaatgctcattgaccatgggcactttcaatataattctgtcatgcttggccttactgcttatgccataaataacttattagatgagtattatgctatggcggccgtttgttttgtcttgtccatttgttttaaacaaatggcattgtattatgcaccgattttttttgcttatcttttaagtagaagtttgttattccccaaatttaacatagctagattgacggttattgcgtttgcaacactcgcaacttttgctataatatttgcgccattatatttcttgggaggaggattaaagaatattcaccaatgtattcacaggatattcccttttgccaggggcatcttcgaagacaaggttgctaacttctggtgcgttacgaacgtgtttgtaaaatacaaggaaagattcactatacaacaactccagttatattctttgattgccaccgtgattggtttcttaccagccatgataatgacattacttcatcccaaaaagcatcttctcccatacgtgttaatcgcatgttccatgtccttttttctttttagctttcaagtacatgagaaaactatcctcatcccacttttgcctattacattactctactcctctactgattggaatgttttatctcttgtaagttggataaacaatgtggctttgtttacgttgtggcctttgttgaaaaaggacggtcttcatttacagtatgccgtatctttcttattaagcaattggttgattggaaatttcagttttattacaccaaggttcttgccaaaatctttaactcctggcccttctatcagcagcatcaatagcgactatagaagaagaagcttattaccatataatgtggtttggaaaagttttatcataggaacgtatattgctatgggcttttatcatttcttagatcaatttgtagcacctccatctaaatatccagacttgtgggtgttgttgaactgtgctgttgggttcatttgctttagcatattttggttatggtcttattacaagatattcacttccggtagcaaatccatgaaggacttgtga

SEQ ID NO: 10141 - DNA, 1437 bp, Saccharomyces cerevisiae
atgaaattctctaccatcttacctatactttgggcaaattgctgtctttgtatgatcatccctgatttcgacgggatagttcgttttattgagaatattgatggtactcgcagtgtaagagcaggagaaggtttgggacagcatgatcctggaaattttcacactgaacatcaacatgtcgctcataaaacagagtttcttccttatcggtatgtcatagtctttaatgaagatatttccctccagcagattcaatcgcatatgcaagtggtacagaaggatcatagtacctcagtaggtaagcttacagaaaatgacgctttttggagggtaatttcttcttcagtatcatctaaatctcaatttggaggtattgataatttttttgacataaatggtctatttcgaggttatactggctatttcactgatgaaatcattaaaataatctcccaggacccaatcataaagttcgtagagcaagaaactacagtaaaaatatctaattcgtcattgcaggaagaagcgccttggggtttacatagagtttcgcacagggagaaaccaaaatatggacaagatttggaatatttatatgaagatgccgccggaaaaggtgtcacatcatatgtactcgacacaggaattgataccgagcacgaggactttgaagggcgtgctgagtggggagccgttataccagcaaacgatgaagcttctgatttgaatggtcatggaactcactgtgcggggattatcggatcgaagcactttggtgtagccaaaaatacaaaaatagtagctgtcaaagttcttcgttctaatggggaagggacggtttcagatgttattaaaggtatagagtatgttactaaggagcatatagaatcgtcgaagaaaaagaataaagaattcaaaggatcgactgccaatctttctttgggaagtagcaaatcgctagctatggaaatggctgtaaatgcagctgtagatagcggtgtccattttgctattgcggcaggaaatgaggatgaagatgcttgtctcagttcaccagcaggagctgaaaaaagtattacggtcggtgcttcgacatttagtgatgatagagcattcttttcgaactggggcacatgtgttgatgtgtttgctcccggtataaatattatgtccacctatattggttcaaggaatgcaactttaagtttatcaggtacttccatggcgtccccgcacgttgctggtattttaagttactttttatcattacagcctgcaccagacagtgaatttttcaacgacgctccctcacctcaagaattgaaagaaaaagtcctaaaatttagtacacagggagtactgggtgatatcggtgatgatactcctaacaaattaatatataatgggggaggtaagaaattggatggtttttggtag

SEQ ID NO: 10142 - DNA, 1437 bp, Artificial Sequence
  Description of Artificial Sequence: Synthetic polynucleotide
atgaaattctctaccatcttacctatactttgggcaaattgctgtctttgtatgatcatccctgatttcgacgggatagttcgttttattgagaatattgatggtactcgcagtgtaagagcaggagaaggtttgggacagcatgatcctggaaattttcacactgaacatcaacatgtcgctcataaaacagagtttcttccttatcgttatgtcatagtctttaatgaagatatttccctccagcagattcaatctcatatgcaagtggtacagaaggatcatagtacctctgtaggtaagcttacagaaaatgacgctttttggagggtaatttcttcttctgtatcttctaaatctcaatttggaggtattgataatttttttgacataaatggtttatttagaggttatactggctatttcactgatgaaatcattaaaataatctcccaggacccaatcataaagttcgtagagcaagaaactacagtaaaaatatctaattcttctttgcaggaagaagcgccttggggtttacatagagtttctcacagggagaaaccaaaatatggacaagatttggaatatttatatgaagatgccgccggaaaaggtgtcacatcttatgtactcgacacaggaattgataccgagcacgaggactttgaagggcgtgctgagtggggagccgttataccagcaaacgatgaagcttctgatttgaatggtcatggaactcactgtgcggggattatcggatccaagcactttggtgtagccaaaaatacaaaaatagtagctgtcaaagttcttcgttctaatggggaagggacggtttctgatgttattaaaggtatagagtatgttactaaggagcatatagaaagttccaagaaaaagaataaagaattcaaaggatctactgccaatctttctttgggaagtagcaaatctttggctatggaaatggctgtaaatgcagctgtagatagcggtgtccattttgctattgcggcaggaaatgaggatgaagatgcttgtctcagttctccagcaggagctgaaaaaagtattacggtcggtgcttctacatttagtgatgatagagcattcttttccaactggggcacatgtgttgatgtgtttgctcccggtataaatattatgtccacctatattggttctaggaatgcaactttaagtttatctggtacttccatggcgtccccgcacgttgctggtattttaagttactttttatctttacagcctgcaccagacagtgaatttttcaacgacgctccctctcctcaagaattgaaagaaaaagtcttgaaatttagtacacagggagtattgggtgatatcggtgatgatactcctaacaaattaatatataatgggggaggtaagaaattggatggtttttggtga

SEQ ID NO: 10143 - DNA, 765 bp, Saccharomyces cerevisiae
atgcgtcaaaagagggctaagtcatataggaaacaacttcttgtttacagtcacacatttaagttccgtgagccatatcaagttttggttgataatcagcttgttttagaatgtaataattctaattttaatctaccgagtgggttgaaaagaacgttgcaagcagacgtaaaggtcatgatcacacagtgttgcatacaagcgttatatgaaactagaaatgatggtgcaattaatttagcgaaacaatttgagagacgtcgttgtaaccactcttttaaagatccaaagtcacctgcggagtgcatcgaaagcgtcgttaatattagcggtgcaaataaacacaggtatgtggttgcttctcaggacatagatttgaggaggaagctgaggacggttccgggtgttccattaatccatttaaccaggtctgttatggttatggaacctctcagtacggcgagtgccaaggcaagcaagattactgaagaacaaaaattgtataagggtctcaatgatcctaatattgaaaaacttcaagaaagtggtgatggatcaggaaaggaatctatcactaagaaaagaaagcttggtccaaaggctcctaatcctttgagcgtaaagaagaagaagaaagtcaactcgcccagcgatgaggtgaaagacaaagaagatacttctaaagaaaagaaaaaaagaagaagaaggaaacacaaaagcaacactaacgtccccgtttcaaatgggaccacagccgcgcagtaa

SEQ ID NO: 10144 - DNA, 765 bp, Artificial Sequence
  Description of Artificial Sequence: Synthetic polynucleotide
atgcgtcaaaagagggctaagagttataggaaacaacttcttgtttacagtcacacatttaagttccgtgagccatatcaagttttggttgataatcagcttgttttagaatgtaataattctaattttaatttaccgagtgggttgaaaagaacgttgcaagcagacgtaaaggtcatgatcacacagtgttgcatacaagcgttatatgaaactagaaatgatggtgcaattaatttagcgaaacaatttgagagacgtcgttgtaaccactcttttaaagatccaaagtctcctgcggagtgcatcgaaagcgtcgttaatattagcggtgcaaataaacacaggtatgtggttgcttctcaggacatagatttgaggaggaagttaaggacggttccgggtgttccattaatccatttaaccaggtctgttatggttatggaacctctcagtacggcgagtgccaaggcaagcaagattactgaagaacaaaaattgtataagggtctcaatgatcctaatattgaaaaacttcaagaaagtggtgatggatctggaaaggaatctatcactaagaaaagaaagcttggtccaaaggctcctaatcctttgagcgtaaagaagaagaagaaagtcaactctcccagcgatgaggtgaaagacaaagaagatacttctaaagaaaagaaaaaaagaagaagaaggaaacacaaaagcaacactaacgtccccgtttctaatgggaccacagccgcgcagtga

SEQ ID NO: 10145 - DNA, 2835 bp, Saccharomyces cerevisiae
atgatatcagcactagattctatacccgagccccaaaactttgcgcctagtccagatttcaaatggctttgtgaagagctatttgtgaagatacatgaagttcaaattaatggaacggccggcactggcaaatcaaggtctttcaagtactatgaaataatatcgaatttcgtcgaaatgtggagaaaaaccgtgggaaataatatatatcctgcactggttcttgctcttccctaccgcgatagacgaatctataatattaaggattatgtattaataagaactatatgctcttacttgaagttgccaaaaaattctgcaacagagcagcggttaaaagattggaaacagcgtgtcggtaaaggtgggaatctttcttctcttcttgtggaagaaattgctaaaagaagggctgaacctagctcaaaagcgattacaattgataacgtcaatcactatctggatagtttgagtggagacaggttcgcttccggacgaggatttaagagtcttgtcaagtccaaacctttcctgcactgtgtggagaatatgagtttcgtcgaattaaaatacttctttgatatcgtgcttaaaaatagagtaataggaggtcaagagcacaaattgctaaactgctggcatcctgatgctcaggattatcttagcgtgatatctgatttaaaggtggtaacttcaaaactttatgatccaaaagttcgtctaaaggatgatgatttgagtataaaagttggctttgcattcgccccccaattagccaaaaaagtgaatctttcttatgagaaaatatgccgtacactacatgatgattttttggtagaagaaaaaatggatggagaacgaattcaagttcattatatgaattatggtgaatccataaaattttttagtagacggggcatcgactatacctatttgtacggagcgagcttatcatcaggaactatatctcaacatttgaggtttacagatagtgttaaagaatgtgttttagatggagaaatggtgacgtttgatgcaaaaagacgggtgattcttccattcggtcttgttaaaggaagtgcaaaggaagcgctatcttttaatagtataaataatgttgactttcaccccttatatatggtgtttgatctgttatacctgaatgggacttcgttgacaccattaccccttcatcaaaggaagcaatatctgaacagcattttaagtcccttgaaaaatattgtagaaatagtacgatcttctagatgttatggtgtggagtcaatcaaaaagtctttagaagttgcaatctcactgggttcagaaggagttgttttgaaatattataattcaagttataatgtcgccagtcgaaacaacaactggatcaaggtaaaacctgaatatttggaggaatttggagagaatttagacttaatagtaataggcagagattctgggaaaaaagattcttttatgctagggttacttgtgctagatgaagaagagtataaaaagcaccaaggagactcctctgaaattgtagaccactcaagccaagaaaaacacatacaaaattcaagaagaagggtgaaaaaaatactttcattctgttctatcgcaaacggtatatctcaagaagaattcaaagaaatcgaccgcaaaacgagaggacattggaaaagaacctccgaagttgctccccctgcttcaattttagaatttggctcaaaaatacctgccgaatggattgaccccagtgaatcaattgttctagaaataaaatcacggtctttggataacacagaaacgaatatgcagaagtacgctaccaattgtactttgtacggtggctattgtaaaagaatacggtacgataaagaatggacagattgttacacacttaacgacttatacgaaagtaggacggttaaatctaaccccagctatcaagcggaaaggtcacagcttggattgatacggaaaaagagaaagagagtacttatttcagacagctttcaccaaaacaggaaacaactgccaatttcaaacatctttgccggattacttttttatgttctctctgactatgtcacggaggacactggaatacggattacacgggcagaacttgaaaaaactattgtggaacatggtggtaaactgatatataatgtaattttaaaacgtcattcaattggggacgttcggttaatcagctgtaaaactaccacggaatgcaaggctttaatagatcgaggatatgatatattgcacccaaattgggtactcgattgtatagcatataagaggctcatcctgatcgagcccaattattgctttaacgtctctcaaaaaatgagagccgtcgctgaaaaaagggtagattgtttgggtgatagttttgaaaatgacatttcggaaaccaaactgtcatcattgtataaatcacaactaagtctaccaccgatgggggaactcgagatagattctgaggttcggcggtttccattatttttattctccaacaggattgcatacgtaccacgtcgcaaaattagcacagaagatgacattatagaaatgaaaattaagttgtttggtggaaaaataacagatcaacagtcactttgtaacttaataattataccatatactgatcctattttgaggaaagactgcatgaatgaggtacacgaaaaaataaaagaacaaataaaggcttctgatactataccgaaaatagccagggtcgttgcccctgaatgggtggatcattctattaatgaaaactgtcaagtgcctgaagaagacttccccgtagtcaactactga

SEQ ID NO: 10146 - DNA, 2835 bp, Artificial Sequence
  Description of Artificial Sequence: Synthetic polynucleotide
atgatatctgcattggattctatacccgagccccaaaactttgcgcctagtccagatttcaaatggctttgtgaagagttatttgtgaagatacatgaagttcaaattaatggaacggccggcactggcaaatctaggtctttcaagtactatgaaataatatccaatttcgtcgaaatgtggagaaaaaccgtgggaaataatatatatcctgcattggttcttgctcttccctaccgcgatagaagaatctataatattaaggattatgtattaataagaactatatgctcttacttgaagttgccaaaaaattctgcaacagagcagagattaaaagattggaaacagcgtgtcggtaaaggtgggaatctttcttctcttcttgtggaagaaattgctaaaagaagggctgaacctagcagtaaagcgattacaattgataacgtcaatcactatttggatagtttgagtggagacaggttcgcttccggaagaggatttaagagtcttgtcaagtccaaacctttcttgcactgtgtggagaatatgagtttcgtcgaattaaaatacttctttgatatcgtgcttaaaaatagagtaataggaggtcaagagcacaaattgttgaactgctggcatcctgatgctcaggattatcttagcgtgatatctgatttaaaggtggtaacttctaaactttatgatccaaaagttcgtttgaaggatgatgatttgagtataaaagttggctttgcattcgccccccaattagccaaaaaagtgaatctttcttatgagaaaatatgccgtacattgcatgatgattttttggtagaagaaaaaatggatggagaaagaattcaagttcattatatgaattatggtgaatccataaaattttttagtagaagaggcatcgactatacctatttgtacggagcgagcttatcttctggaactatatctcaacatttgaggtttacagatagtgttaaagaatgtgttttagatggagaaatggtgacgtttgatgcaaaaagaagagtgattcttccattcggtcttgttaaaggaagtgcaaaggaagcgctttcttttaatagtataaataatgttgactttcaccccttatatatggtgtttgatttattatacttgaatgggacttctttgacaccattaccccttcatcaaaggaagcaatatttgaacagcattttaagtcccttgaaaaatattgtagaaatagtaagatcttctagatgttatggtgtggagagtatcaaaaagtctttagaagttgcaatctctttgggttctgaaggagttgttttgaaatattataatagtagttataatgtcgccagtagaaacaacaactggatcaaggtaaaacctgaatatttggaggaatttggagagaatttagacttaatagtaataggcagagattctgggaaaaaagattcttttatgttggggttacttgtgttggatgaagaagagtataaaaagcaccaaggagactcctctgaaattgtagaccacagtagccaagaaaaacacatacaaaattctagaagaagggtgaaaaaaatactttctttctgttctatcgcaaacggtatatctcaagaagaattcaaagaaatcgaccgcaaaacgagaggacattggaaaagaacctccgaagttgctccccctgcttccattttagaatttggctctaaaatacctgccgaatggattgaccccagtgaaagtattgttttggaaataaaaagcagatctttggataacacagaaacgaatatgcagaagtacgctaccaattgtactttgtacggtggctattgtaaaagaataagatacgataaagaatggacagattgttacacacttaacgacttatacgaaagtaggacggttaaatctaaccccagctatcaagcggaaaggagccagcttggattgataagaaaaaagagaaagagagtacttatttctgacagctttcaccaaaacaggaaacaattaccaatttccaacatctttgccggattacttttttatgttctctctgactatgtcacggaggacactggaataagaattacaagagcagaacttgaaaaaactattgtggaacatggtggtaaattgatatataatgtaattttaaaacgtcattctattggggacgttagattaatcagctgtaaaactaccacggaatgcaaggctttaatagatagaggatatgatatattgcacccaaattgggtactcgattgtatagcatataagaggctcatcttaatcgagcccaattattgctttaacgtctctcaaaaaatgagagccgtcgctgaaaaaagggtagattgtttgggtgatagttttgaaaatgacatttctgaaaccaaattatcttctttgtataaatctcaattgagtttaccaccgatgggggaactcgagatagattctgaggttaggaggtttccattatttttattctccaacaggattgcatacgtaccacgtcgcaaaattagcacagaagatgacattatagaaatgaaaattaagttgtttggtggaaaaataacagatcaacagtctctttgtaacttaataattataccatatactgatcctattttgaggaaagactgcatgaatgaggtacacgaaaaaataaaagaacaaataaaggcttctgatactataccgaaaatagccagggtcgttgcccctgaatgggtggatcattctattaatgaaaactgtcaagtgcctgaagaagacttccccgtagtcaactactga

SEQ ID NO: 10147 - DNA, 942 bp, Saccharomyces cerevisiae
atgggaaaaggtaaaaataagatgcacgaacccaaaaatggaagaccacagagaggcgctaatgggcacagttccaggcaaaaccataggcgcatggaaatgaagtacgataattcagaaaaaatgaagtttcctgttaaactggctatgtgggattttgatcattgcgatccaaagagatgcagtggtaaaaaacttgaaaggttgggcttaattaaatcattgagagttggacagaaatttcaaggtattgtcgtttcgccaaacggcaaaggtgttgtttgccctgatgatctagaaattgtcgaacaacacggcgcttcggtggtcgagtgttcttgggcacgtttagaagaggtacccttcaataaaataggcggtaagcacgaaaggctgctgccgtatttagtggccgctaatcaagtaaattacgggagaccatggaggctcaattgcgttgaggcattagcggcttgttttgctatcgtcgggagaatggattgggccagtgaattgttatcacacttctcgtggggaatgggatttttagaattaaacaaagaattgcttgaaatctatcagcagtgcactgactgcgactctgtaaagagggctgaagaggaatggttgcaaaaattagaaaaggaaactcaagaacgaaaatcccgagctaaagaagaagatatatggatgatgggtaacataaatagaaggggtaatggttcgcaatctgacacatcagagagtgaggaaaactcagaacaatctgatttggaaggcaataatcaatgtattgaatatgactctttaggtaatgctattcgtatagataacatgaaaagcagggaagcgcaatctgaggaatcagaagacgaggaaagtggttcaaaagaaaatggagagcctttaagttatgaccccttaggcaatttaattcgatag

SEQ ID NO: 10148 - DNA, 942 bp, Artificial Sequence
  Description of Artificial Sequence: Synthetic polynucleotide
atgggaaaaggtaaaaataagatgcacgaacccaaaaatggaagaccacagagaggcgctaatgggcacagttccaggcaaaaccataggcgcatggaaatgaagtacgataattctgaaaaaatgaagtttcctgttaaattggctatgtgggattttgatcattgcgatccaaagagatgcagtggtaaaaaacttgaaaggttgggcttaattaaatctttgagagttggacagaaatttcaaggtattgtcgtttctccaaacggcaaaggtgttgtttgccctgatgatttggaaattgtcgaacaacacggcgcttctgtggtcgagtgttcttgggcacgtttagaagaggtacccttcaataaaataggcggtaagcacgaaaggttattaccgtatttagtggccgctaatcaagtaaattacgggagaccatggaggctcaattgcgttgaggcattagcggcttgttttgctatcgtcgggagaatggattgggccagtgaattgttatcccacttcagttggggaatgggatttttagaattaaacaaagaattgcttgaaatctatcagcagtgcactgactgcgactctgtaaagagggctgaagaggaatggttgcaaaaattagaaaaggaaactcaagaaagaaaatccagagctaaagaagaagatatatggatgatgggtaacataaatagaaggggtaatggttctcaatctgacacaagtgagagtgaggaaaactctgaacaatctgatttggaaggcaataatcaatgtattgaatatgactctttaggtaatgctattcgtatagataacatgaaaagcagggaagcgcaatctgaggaaagtgaagacgaggaaagtggttccaaagaaaatggagagcctttaagttatgaccccttaggcaatttaattagatga

SEQ ID NO: 10149 - DNA, 1041 bp, Saccharomyces cerevisiae
atgtcagcatcaaaagaagaaattgctgcccttattgtaaactacttttcttccattgtggaaaagaaagaaatttcagaagatggcgccgattctttaaatgttgctatggactgtatctctgaagcctttggctttgaaagagaagctgtttcaggcattttaggcaagtctgaattcaagggtcaacatcttgctgatatattaaattctgcgtcaagagttccagaatcgaataagaaagacgatgctgagaatgtcgagattaatattccagaagatgatgcggaaactaaagccaaagctgaggacttgaaaatgcaaggtaataaagcaatggccaacaaggattacgaactggcaatcaataaatatactgaagccattaaagttttaccaacgaatgctatttattacgccaatagagcggctgctcattcatccctgaaagaatatgatcaagcggtcaaagacgctgaatctgcaatttctattgacccatcttatttcagaggctactctagattgggttttgctaaatatgcgcaaggtaaacccgaagaagcccttgaagcatacaaaaaggttcttgatatagagggcgataatgcaacagaagctatgaaaagggattatgaaagtgccaagaagaaggttgagcaatctttgaatctggagaaaaccgttccagaacagtcaagggatgctgatgtcgatgcaagtcagggtgctagtgcgggtggattgccagatcttggttctttattaggaggtggtcttggaggtttaatgaacaacccacaattgatgcaggctgcgcaaaaaatgatgagcaatccaggtgcaatgcagaatattcaaaaaatgatgcaagatccaagtatcagacagatggctgaaggctttgcttcaggcggaggaactccaaatttgtctgacttgatgaataacccagcactcagaaacatggcaggcaatctttttggtggagcaggtgcccaatctacagatgaaacaccagacaatgagaacaagcaatag

SEQ ID NO: 10150 - DNA, 1041 bp, Artificial Sequence
  Description of Artificial Sequence: Synthetic polynucleotide
atgtctgcatccaaagaagaaattgctgcccttattgtaaactacttttcttccattgtggaaaagaaagaaatttctgaagatggcgccgattctttaaatgttgctatggactgtatctctgaagcctttggctttgaaagagaagctgtttctggcattttaggcaagtctgaattcaagggtcaacatcttgctgatatattaaattctgcgtccagagttccagaaagtaataagaaagacgatgctgagaatgtcgagattaatattccagaagatgatgcggaaactaaagccaaagctgaggacttgaaaatgcaaggtaataaagcaatggccaacaaggattacgaattggcaatcaataaatatactgaagccattaaagttttaccaacgaatgctatttattacgccaatagagcggctgctcattcttccttgaaagaatatgatcaagcggtcaaagacgctgaatctgcaatttctattgacccatcttatttcagaggctactctagattgggttttgctaaatatgcgcaaggtaaacccgaagaagcccttgaagcatacaaaaaggttcttgatatagagggcgataatgcaacagaagctatgaaaagggattatgaaagtgccaagaagaaggttgagcaatctttgaatttggagaaaaccgttccagaacagtctagggatgctgatgtcgatgcaagtcagggtgctagtgcgggtggattgccagatcttggttctttattaggaggtggtcttggaggtttaatgaacaacccacaattgatgcaggctgcgcaaaaaatgatgagcaatccaggtgcaatgcagaatattcaaaaaatgatgcaagatccaagtatcagacagatggctgaaggctttgcttctggcggaggaactccaaatttgtctgacttgatgaataacccagcactcagaaacatggcaggcaatctttttggtggagcaggtgcccaatctacagatgaaacaccagacaatgagaacaagcaatga

SEQ ID NO: 10151 - DNA, 1137 bp, Saccharomyces cerevisiae
atgagaccgaacaaaacaagtctgcttctggcgttattatccattttatcgcaagcgaacgcctatgaatacgtgaattgttttagctcactaccctctgacttttcaaaggccgattcatataactggcagtcgagttcacactgtaacagtgagtgtagcgcaaaaggtgcaagctactttgccctttataatcattcagaatgttattgtggtgatactaatccatctggttcggaatctacttcctcttcatgtaatacgtattgctttggttacagcagtgagatgtgtggtggtgaagatgcctattctgtgtaccaacttgactctgacacaaatagcaatagcataagcagctcagattcaagtacggagtctacttctgcgtcgtcttccacaacttcttcaacaacgtcctccacaacatcaactacatcatcgactacatcatcaactacatcatcaatggcgtcttcctctacagtacagaattcccccgagtcaactcaagcagctgcctctatttcaacgtcacagagttcgagcactgtaacgtcagaaagctcgctaacttcggatactttggcaacgagcagtactagctctcaatcacaggacgccacttcgataatctattccactacttttcacactgagggcggttccacaatttttgtcacgaacaccatcacggcaagtgcacagaattcaggatcggccacaggtacagctggatctgactctacgagtggaagtaaaactcataaaaagaaagccaatgtaggggcaattgtaggcggcgttgtaggtggtgtagtgggagccgtagccattgctctttgtatcttgttgattgtcagacacattaatatgaagcgggaacaagacaggatggaaaaggaataccaagaggcgataaaaccagttgagtaccctgataaactatacgcctcttcattttcatctaatcacgggccctcttcaggtagcttcgaggaggagcacaccaaagggcaaactgatattaaccctttcgacgactcaaggagaataagtaacggaacattcataaatggcggaccaggagggaaaaacaacgttttaacagtggtcaatccagacgaagctgattga

SEQ ID NO: 10152 - DNA, 1137 bp, Artificial Sequence
  Description of Artificial Sequence: Synthetic polynucleotide
atgagaccgaacaaaacaagtttacttttggcgttattatccattttatctcaagcgaacgcctatgaatacgtgaattgttttagctctttaccctctgacttttccaaggccgattcttataactggcagagcagttctcactgtaacagtgagtgtagcgcaaaaggtgcaagctactttgccctttataatcattctgaatgttattgtggtgatactaatccatctggttctgaatctacttcctcttcttgtaatacgtattgctttggttacagcagtgagatgtgtggtggtgaagatgcctattctgtgtaccaacttgactctgacacaaatagcaatagcataagcagcagtgattctagtacggagtctacttctgcgtcttcttccacaacttcttctacaacgtcctccacaacatctactacatcttctactacatcttctactacatcttctatggcgtcttcctctacagtacagaattcccccgagtctactcaagcagctgcctctatttctacgagccagagtagtagcactgtaacgagtgaaagctctttgacttctgatactttggcaacgagcagtactagctctcaatctcaggacgccacttccataatctattccactacttttcacactgagggcggttccacaatttttgtcacgaacaccatcacggcaagtgcacagaattctggatctgccacaggtacagctggatctgactctacgagtggaagtaaaactcataaaaagaaagccaatgtaggggcaattgtaggcggcgttgtaggtggtgtagtgggagccgtagccattgctctttgtatcttgttgattgtcagacacattaatatgaagagagaacaagacaggatggaaaaggaataccaagaggcgataaaaccagttgagtaccctgataaactttacgcctcttctttttcttctaatcacgggccctcttctggtagcttcgaggaggagcacaccaaagggcaaactgatattaaccctttcgacgacagcaggagaataagtaacggaacattcataaatggcggaccaggagggaaaaacaacgttttaacagtggtcaatccagacgaagctgattga

SEQ ID NO: 10153 - DNA, 225 bp, Saccharomyces cerevisiae
atgtggagatcttatcttgtttttctcttctttatgacaccaaggatacaaacatattgtcctgtaccggtactaaggtcaatggcagtattaaatattatctctccgcttataatttttgtcagtcctattaaaaagcaagacagtttacacagcagcgcttgttacgcaaatttgacgttagtggaaaagctgcaactttggcattctatgtcaaacgattag

SEQ ID NO: 10154 - DNA, 225 bp, Artificial Sequence
  Description of Artificial Sequence: Synthetic polynucleotide
atgtggagatcttatcttgtttttctcttctttatgacaccaaggatacaaacatattgtcctgtaccggtattgaggtctatggcagtattaaatattatctctccgcttataatttttgtcagtcctattaaaaagcaagacagtttacacagcagcgcttgttacgcaaatttgacgttagtggaaaagttacaactttggcattctatgtccaacgattga

SEQ ID NO: 10155 - DNA, 1464 bp, Saccharomyces cerevisiae
atggcttactctaaaatcacattactagccgctcttgctgctattgcttacgctcaaacccaagcacaaatcaacgaattgaacgttgttttagatgatgttaagaccaacattgccgactacatcaccctatcctacactccaaattcaggtttttccttggaccaaatgccagctggtattatggatattgctgcgcaattggttgcaaatccaagtgatgactcctacaccactttgtactctgaagtggacttttctgctgttgagcatatgttgactatggtcccatggtactcttctagactgcttccagaattagaagcaatggatgcttctctaactacctcaagttctgctgccacatcttcaagtgaagttgctagctcttctattgcttcatccactagctcttctgttgcaccatcctcaagtgaagttgtcagctcttccgttgcaccatcctcaagtgaagttgtcagctcttccgttgcaccatcctcaagtgaagttgtcagctcttccgttgcttcatcctcaagtgaagttgccagctcctctgttgcgccatcctcaagtgaagttgtcagctcttccgttgcttcatcctcaagtgaagttgccagctcctctgttgcgccatcctcaagtgaagttgtcagctcttccgttgcaccatcctcaagtgaagttgtcagctcttccgttgcttcatcctcaagtgaagttgccagctcctctgttgcgccatcctcaagtgaagttgtcagctcttccgttgcttcttctacaagcgaagctactagttcttctgctgtcacatcttcctccgctgtttcctcttcgaccgagtctgttagctcttcctctgtcagttcttcctcagccgtttcctcttctgaagctgtcagttcctctccagtttcctcagttgtttcatcttcggccggacctgctagctcaagcgttgctccttacaactcaaccattgctagctcttcttccactgcccagacttctatctcgaccattgctccttacaactccacaaccaccaccaccccagctagttctgcttccagcgttattatctcaaccagaaacggtaccactgttactgaaactgacaacactcttgtcaccaaagaaaccactgtctgtgactactcttcaacatctgccgttccagcttccaccaccggttacaacaattctactaaggtttcaaccgctactatctgcagtacatgcaaagaaggtacctctactgcaactgacttctctacactaaagactacagttaccgtatgtgactccgcctgtcaagctaagaagtctgctaccgttgttagcgttcaatctaaaactaccggtatcgttgaacaaaccgaaaacggtgctgccaaggctgttatcggtatgggtgccggtgctttagctgctgttgccgccatgctactatga

SEQ ID NO: 10156 - DNA, 1464 bp, Artificial Sequence
  Description of Artificial Sequence: Synthetic polynucleotide
atggcttactctaaaatcacattattagccgctcttgctgctattgcttacgctcaaacccaagcacaaatcaacgaattgaacgttgttttagatgatgttaagaccaacattgccgactacatcaccttatcctacactccaaattctggtttttccttggaccaaatgccagctggtattatggatattgctgcgcaattggttgcaaatccaagtgatgactcctacaccactttgtactctgaagtggacttttctgctgttgagcatatgttgactatggtcccatggtactcttctagattacttccagaattagaagcaatggatgcttctttgactacctctagttctgctgccacatcttccagtgaagttgctagctcttctattgcttcttccactagctcttctgttgcaccatcctccagtgaagttgtcagctcttccgttgcaccatcctccagtgaagttgtcagctcttccgttgcaccatcctccagtgaagttgtcagctcttccgttgcttcttcctccagtgaagttgccagctcctctgttgcgccatcctccagtgaagttgtcagctcttccgttgcttcttcctccagtgaagttgccagctcctctgttgcgccatcctccagtgaagttgtcagctcttccgttgcaccatcctccagtgaagttgtcagctcttccgttgcttcttcctccagtgaagttgccagctcctctgttgcgccatcctccagtgaagttgtcagctcttccgttgcttcttctacaagcgaagctactagttcttctgctgtcacatcttcctccgctgtttcctcttccaccgagtctgttagctcttcctctgtcagttcttcctctgccgtttcctcttctgaagctgtcagttcctctccagtttcctctgttgtttcttcttctgccggacctgctagcagcagcgttgctccttacaactctaccattgctagctcttcttccactgcccagacttctatctccaccattgctccttacaactccacaaccaccaccaccccagctagttctgcttccagcgttattatctccaccagaaacggtaccactgttactgaaactgacaacactcttgtcaccaaagaaaccactgtctgtgactactcttctacatctgccgttccagcttccaccaccggttacaacaattctactaaggtttctaccgctactatctgcagtacatgcaaagaaggtacctctactgcaactgacttctctacattgaagactacagttaccgtatgtgactccgcctgtcaagctaagaagtctgctaccgttgttagcgttcaatctaaaactaccggtatcgttgaacaaaccgaaaacggtgctgccaaggctgttatcggtatgggtgccggtgctttagctgctgttgccgccatgttactttga

SEQ ID NO: 10157 - DNA, 756 bp, Saccharomyces cerevisiae
atggcttacatcaagatcgctttattagctgctatcgctgctttggcttctgcccaaactcaggaagaaattgacgaattgaacgttattttgaatgacgttaagtccaacttgcaagaatatattagtttggctgaagattcttcatctggattttccttaagcagtctgccatctggtgttttagacatcggtttagctttggcttccgccactgatgactcctacactactttgtactctgaggttgactttgctgctgttagcaagatgttgaccatggttccatggtattcttccaggcttctaccagaattggaatccttgttaggaacttctaccaccgctgcctcttctactgaagcttcttctgctgctacttcttccgctgttgcttcctccagtgaaactacttcttctgccgtcgcttcctccagtgaagctacttcttctgccgtcgcttcttccagtgaagcttcttcttctgctgctacttcttctgctgtcgcttcttccagtgaggctacctcttccaccgtcgcttcctctaccaaggctgcctcttccactaaggcttcttcctctgctgtttcttcagctgttgcttcttccaccaaagcctccgccatttctcaaatcagtgatggtcaagttcaagccactagcactgtttccgaacaaactgaaaacggtgctgccaaggctgtcatcggtatgggtgctggtgtcatggccgctgccgccatgttattataa

SEQ ID NO: 10158 - DNA, 756 bp, Artificial Sequence
  Description of Artificial Sequence: Synthetic polynucleotide
atggcttacatcaagatcgctttattagctgctatcgctgctttggcttctgcccaaactcaggaagaaattgacgaattgaacgttattttgaatgacgttaagtccaacttgcaagaatatattagtttggctgaagattcttcttctggattttccttaagcagtttaccatctggtgttttagacatcggtttagctttggcttccgccactgatgactcctacactactttgtactctgaggttgactttgctgctgttagcaagatgttgaccatggttccatggtattcttccaggcttttaccagaattggaatccttgttaggaacttctaccaccgctgcctcttctactgaagcttcttctgctgctacttcttccgctgttgcttcctccagtgaaactacttcttctgccgtcgcttcctccagtgaagctacttcttctgccgtcgcttcttccagtgaagcttcttcttctgctgctacttcttctgctgtcgcttcttccagtgaggctacctcttccaccgtcgcttcctctaccaaggctgcctcttccactaaggcttcttcctctgctgtttcttctgctgttgcttcttccaccaaagcctccgccatttctcaaatcagtgatggtcaagttcaagccactagcactgtttccgaacaaactgaaaacggtgctgccaaggctgtcatcggtatgggtgctggtgtcatggccgctgccgccatgttattatga

SEQ ID NO: 10159 - DNA, 4185 bp, Saccharomyces cerevisiae
atgtcaatttcaaagtacttcactcccgttgctgacgggtcactcactttcaatggcgcgaacattcaatttggcgccgatgctcaaggcgagtcaaaaaagagttatgacgctgaggacagcatgccgaatccggcaaatcaactaaatgacataaccttccaagcagaggctggtgaaatggttttggttttgggttatcccacatccactctatttaagactttgtttcatggtaaaactagtttgtcatactctcctccaggctcgattaaatttaaaaataatgagtttaagagcttttccgaaaaatgtccccaccaaatcatttacaataatgaacaagatgtgcatttcccatttctaacggtagaacaaacaattgattttgccttgagttgtaagttcgatattccaaaaggtgagcgcgatcaaataagaaatgaacttctaagagaattcggcctgtctcatgtattgaaaactattgtaggaaatgattttttccgtggtgtttctggtggtgagcgtaaacgtatttctattattgaaacgtttattgctaatggttccgtttatctatgggataattctactaaaggtttagattccgccacagctctcgattttttggaaattcttagaaaaatggcaaaagctactcgttctgtaaacttagtcagaatttcccaggcaagtgataaaattgttgataagtttgacaagattcttatgctatccgattcctaccagcttttctatggtacggtcgatgagtgtttgacttattttcgtgacactttaggtattgagaaagatcctaacgattgtattattgaatatctgacctctatcttaaattttcagttcaaaaataaaaatttggggaatttatcaaattcatcatctgctagcgttctcaaaaccgcaacaggggaagtcactaagtatacttataattctgatttcgatttatatgatcaatggaaacattcttcgtactatagaaatataaagcagcaaatccaggggtcttcaattgatgactccattaaggaagtggatccctctgatgtctcacctatttttaatattccgttgaagaaacaattattattttgcacaaaaagagcttttcaacgaagtttgggtgataaagcttatatgacggcacaatttatttctgtcgttattcaatctttggtcattggttcactgttttacgaaattccgttgactaccattggttcatactcaagaggttctttaacctttttctccattcttttcttcacttttctttctcttgcagatatgcctattgccttccaaagacaacccgtcgttaaaaagcaatcccaacttcacttctatactaactgggttgaaaccctttcaacaacagtgttcgactactgctttaaactttgtttggtaattgtattcagtatcatcctatacttccttgctcacctgcaatacaaggctgcaagatttttcattttcctcctgttcctttccttttacaatttctgtatggtgtccttattcgctttgacgacactagttgctccaaccatttcagttgcaaatttatttgcaggtattctgctactagctatagcaatgtatgcttcttacgtcatctacctgaaaaatatgcatccttggtttgtatggattgcttatctaaatcctgcaatgtacgctatggaggcaatactgtctaatgagctttacaatttgaagctggattgtagtgagacaattgttccaagaggtcctacttacaacgatgttccattttcccataaggcctgtgcttggcaaggtgctactctgggtaatgattacgttagaggccgtgattacttgaagcaaggtttatcctacacgtatcatcatgtgtggagaaactttggtattatcattggtttcctagtattctttattgcctgtactctgtttgcatctcaatatattaagccttatttcaataaggatgaaatagagcgcaacaatagtcgtttgacaagatggctaccatttttgaataaaaagagaggtaccaggtcctctgcaagaaatgacagtaagtatgttggtatcccaaagtcgcactccgtttcgtcttcctcgtctagcctgtcggctgttccatatcagatatcaccctcaaataaggaaatggctctaaacgattataacgagcaacctatcacggaaacagtagagactcaaaagcatatcatctcttggaaaaatatcaactacacagttggtacaaagaaactgattaataatgcatccggtttcatcagttctggtttgaccgccttaatgggtgagtccggtgcaggtaaaactactttgctgaatgtcttatcacaaagagttgagacaggtgttgttagcggcgaaattttgatcgatggccacccattgacagatgaggacgcgtttaagagaagtattggttttgttcaacaacaggatttgcatctagatttgctgtctgtgaaagaatctctggaaatatcatgtcttttgagaggtgatggtgacagggcatacttagacactgtttcaaatttactgaaattgccatctgacattttagtcgctgatttaaacccgactcaaaggaagcttttatctatcggtgttgaacttgttactaagccttcacttttattattcctagacgaaccaacctctgggctggacgctgaggctgcactaacaatcgtcaaatttttaaaacaactttctttacagggtcaggctattttttgtaccattcatcagcctagtaaaagtgtcatcagccattttgacaatattttcttattgaaaaggggtggtgaatgtgtcttctttggaccaatggacgatgcctgcggctatttcatgtctcatgacaacacgctcgtttacgataaagaacatgataaccctgcagatttcgtcattgatgcagtaggtaacagtaactcctcggcagggaaagatacagcggaggaagctcttactttgaacaaagaagccatagattggagtgcattatgggaatcttctgtagaaaagaaactagttaaaaaagaaacagctaggttagaagatgatgctcgtgcgtctggtgttgattacacaacctcattgtggaagcagccttcctacttacagcaattagctcttattacaagaagacaatatatttgtacgaaaagagacatgacttatgtcatggccaagtactgtttgaatggtggcgctggtttgtttatcggtttctcattttggcacattaagcataatattatcggtttgcaggatagtatcttcttctgtttcatggctctttgtgtttcatctccattgatcaatcaaattcaggacaaagccttgaaaacaaaggaagtttatgttgctagggaggcgagatctaacacttatcactggactgttcttcttttgtcacagtcaattattgaactaccactggcacttacaagttccacactatttttcgtctgtgcctttttctcttgtggatttaacaacgctggctggagtgccggtgttttctttttaaactatatgcttttcgctgcttattactcgactcttggtttatggctgatctatactgctcctaatctacaaactgctgctgtttttgttgcgtttatttacagttttacagcatcattctgtggtgttatgcaaccatactctttgtttccaactttttggaaattcatgtacagggtttcgccatacacatattttgtggaaacttttgttagtattctattgcataactgggaaatcaagtgtgacatgtcggagatggttcctggtcaacctctgacggggcaatcttgtggccaatttatggaagctttcatagaagaatacggtggctatctacataataagaacactttcacagtctgcgcttattgtacgtacactgttggcgatgacttcctgaaaaatgagaatatgagttacgaccacgtttggaggaactttggtattgaatgggcttttgttggtttcaatttctttgcgatgtttgctggttactacttaacttacgtggcaagaatatggccaaaggtctttaaaattatcaccaaagtaattccacacagagggaagaagcctgtacagaactaa

SEQ ID NO: 10160 - DNA, 4185 bp, Artificial Sequence
  Description of Artificial Sequence: Synthetic polynucleotide
atgtctatttccaagtacttcactcccgttgctgacgggtctctcactttcaatggcgcgaacattcaatttggcgccgatgctcaaggcgagagtaaaaagagttatgacgctgaggacagcatgccgaatccggcaaatcaattgaatgacataaccttccaagcagaggctggtgaaatggttttggttttgggttatcccacatccactttatttaagactttgtttcatggtaaaactagtttgagttactctcctccaggctccattaaatttaaaaataatgagtttaagagcttttccgaaaaatgtccccaccaaatcatttacaataatgaacaagatgtgcatttcccatttttaacggtagaacaaacaattgattttgccttgagttgtaagttcgatattccaaaaggtgagcgcgatcaaataagaaatgaacttttgagagaattcggcttatctcatgtattgaaaactattgtaggaaatgattttttccgtggtgtttctggtggtgagcgtaaacgtatttctattattgaaacgtttattgctaatggttccgtttatttatgggataattctactaaaggtttagattccgccacagctctcgattttttggaaattcttagaaaaatggcaaaagctactcgttctgtaaacttagtcagaatttcccaggcaagtgataaaattgttgataagtttgacaagattcttatgctttccgattcctaccagcttttctatggtacggtcgatgagtgtttgacttattttcgtgacactttaggtattgagaaagatcctaacgattgtattattgaatatttgacctctatcttaaattttcagttcaaaaataaaaatttggggaatttatccaattcttcttctgctagcgttctcaaaaccgcaacaggggaagtcactaagtatacttataattctgatttcgatttatatgatcaatggaaacattcttcctactatagaaatataaagcagcaaatccaggggtcttccattgatgactccattaaggaagtggatccctctgatgtctctcctatttttaatattccgttgaagaaacaattattattttgcacaaaaagagcttttcaaagaagtttgggtgataaagcttatatgacggcacaatttatttctgtcgttattcaatctttggtcattggttctttattttacgaaattccgttgactaccattggttcttactctagaggttctttaacctttttctccattcttttcttcacttttctttctcttgcagatatgcctattgccttccaaagacaacccgtcgttaaaaagcaatcccaacttcacttctatactaactgggttgaaaccctttctacaacagtgttcgactactgctttaaactttgtttggtaattgtattcagtatcatcttgtacttccttgctcacttgcaatacaaggctgcaagatttttcattttcctcttgttcctttccttttacaatttctgtatggtgtccttattcgctttgacgacattagttgctccaaccatttctgttgcaaatttatttgcaggtattttattattagctatagcaatgtatgcttcttacgtcatctacttgaaaaatatgcatccttggtttgtatggattgcttatttgaatcctgcaatgtacgctatggaggcaatattatctaatgagctttacaatttgaagttggattgtagtgagacaattgttccaagaggtcctacttacaacgatgttccattttcccataaggcctgtgcttggcaaggtgctactttaggtaatgattacgttagaggccgtgattacttgaagcaaggtttatcctacacgtatcatcatgtgtggagaaactttggtattatcattggtttcttagtattctttattgcctgtactttatttgcatctcaatatattaagccttatttcaataaggatgaaatagagcgcaacaatagtcgtttgacaagatggttaccatttttgaataaaaagagaggtaccaggtcctctgcaagaaatgacagtaagtatgttggtatcccaaagtctcactccgtttcttcttcctcttctagcttatctgctgttccatatcagatatctccctccaataaggaaatggctttgaacgattataacgagcaacctatcacggaaacagtagagactcaaaagcatatcatctcttggaaaaatatcaactacacagttggtacaaagaaattgattaataatgcatccggtttcatcagttctggtttgaccgccttaatgggtgagtccggtgcaggtaaaactactttgttgaatgtcttatctcaaagagttgagacaggtgttgttagcggcgaaattttgatcgatggccacccattgacagatgaggacgcgtttaagagaagtattggttttgttcaacaacaggatttgcatttggatttgttatctgtgaaagaatctttggaaatatcttgtcttttgagaggtgatggtgacagggcatacttagacactgtttctaatttattgaaattgccatctgacattttagtcgctgatttaaacccgactcaaaggaagcttttatctatcggtgttgaacttgttactaagccttctcttttattattcttggacgaaccaacctctgggttggacgctgaggctgcattaacaatcgtcaaatttttaaaacaactttctttacagggtcaggctattttttgtaccattcatcagcctagtaaaagtgtcatcagccattttgacaatattttcttattgaaaaggggtggtgaatgtgtcttctttggaccaatggacgatgcctgcggctatttcatgtctcatgacaacacgctcgtttacgataaagaacatgataaccctgcagatttcgtcattgatgcagtaggtaacagtaactcctctgcagggaaagatacagcggaggaagctcttactttgaacaaagaagccatagattggagtgcattatgggaatcttctgtagaaaagaaattggttaaaaaagaaacagctaggttagaagatgatgctcgtgcgtctggtgttgattacacaacctctttgtggaagcagccttcctacttacagcaattagctcttattacaagaagacaatatatttgtacgaaaagagacatgacttatgtcatggccaagtactgtttgaatggtggcgctggtttgtttatcggtttctccttttggcacattaagcataatattatcggtttgcaggatagtatcttcttctgtttcatggctctttgtgtttcttctccattgatcaatcaaattcaggacaaagccttgaaaacaaaggaagtttatgttgctagggaggcgagatctaacacttatcactggactgttcttcttttgtctcagagtattattgaattaccattggcacttacaagttccacattatttttcgtctgtgcctttttctcttgtggatttaacaacgctggctggagtgccggtgttttctttttaaactatatgcttttcgctgcttattactccactcttggtttatggttgatctatactgctcctaatttacaaactgctgctgtttttgttgcgtttatttacagttttacagcatctttctgtggtgttatgcaaccatactctttgtttccaactttttggaaattcatgtacagggtttctccatacacatattttgtggaaacttttgttagtattttattgcataactgggaaatcaagtgtgacatgtctgagatggttcctggtcaacctttgacggggcaatcttgtggccaatttatggaagctttcatagaagaatacggtggctatttgcataataagaacactttcacagtctgcgcttattgtacgtacactgttggcgatgacttcttgaaaaatgagaatatgagttacgaccacgtttggaggaactttggtattgaatgggcttttgttggtttcaatttctttgcgatgtttgctggttactacttaacttacgtggcaagaatatggccaaaggtctttaaaattatcaccaaagtaattccacacagagggaagaagcctgtacagaactga

SEQ ID NO: 10161 - DNA, 207 bp, Saccharomyces cerevisiae
atggcaaaatcggttttcaatttctttcattttgaaatattggagtatttaaaccgttttgtgtatcattcacaatactttcttccatactactgctctcttgaagttcttgggaagagccgaaaaaattggacatttcaatattggtgcttatacattactactgacaagaagataataaaaaagaaagatttctatcaccgatag

SEQ ID NO: 10162 - DNA, 207 bp, Artificial Sequence
  Description of Artificial Sequence: Synthetic polynucleotide
atggcaaaatctgttttcaatttctttcattttgaaatattggagtatttaaaccgttttgtgtatcattctcaatactttcttccatactactgctctcttgaagttcttgggaagagcagaaaaaattggacatttcaatattggtgcttatacattactactgacaagaagataataaaaaagaaagatttctatcaccgttga

SEQ ID NO: 10163 - DNA, 414 bp, Saccharomyces cerevisiae
atggtagcatcatcgatcaatgaagaatcctctttggcggtaaacttgacaagcgatgtagagaaggcttcgaaaactttgtttaaggcattcgaaaagtcatacgcaaatgactacttgatgaaaaagttcttccatatcccaatcactgaaaaagtttcaagggcaagaataaatgcaatgatacattactacacgacgtgctaccatgacttggatggtgaaattgctgaggcaaatgatttcgatgcagtcgcaatatggagccgccctgggtgccacttgcctgctacactatctgacgacgagtctttcaataagatttttttttcacgacttgactgtgaggaagcacgaagtcatgcctctgggaatggactattactacctttatgccatcggaaaagatcctag

SEQ ID NO: 10164 - DNA, 414 bp, Artificial Sequence
  Description of Artificial Sequence: Synthetic polynucleotide
atggtagcatcttctatcaatgaagaatcctctttggcggtaaacttgacaagcgatgtagagaaggcttccaaaactttgtttaaggcattcgaaaagtcctacgcaaatgactacttgatgaaaaagttcttccatatcccaatcactgaaaaagtttccagggcaagaataaatgcaatgatacattactacacgacgtgctaccatgacttggatggtgaaattgctgaggcaaatgatttcgatgcagtcgcaatatggagccgccctgggtgccacttgcctgctacattatctgacgacgagtctttcaataagatttttttttctaggcttgactgtgaggaagcaagaagtcatgcctctgggaatggattattattgcctttatgccatagaaaaagatcctga

SEQ ID NO: 10165 - DNA, 2274 bp, Saccharomyces cerevisiae
atgatgcgtggtttcaagcaaagattaataaagaagaccaccgggtcttcttcttcttcaagcagtaaaaagaaggacaaagagaaggaaaaagaaaaaagttccactacctcatccacatcaaagaagcccgcttcggctagtagctcttcccacgggactactcacagttctgccagcagtaccggatcaaagtctacaactgagaagggcaagcaatctggtagtgttccctcgcaagggaagcatcatagtagctctacatcaaaaacaaaaacagcgacgaccccttcttccagcagcagtagcagtagaagttcaagtgtcagtcgctccggttcaagctccacaaagaaaacaagttcaagaaaaggacaagaacagtccaaacaatcgcaacagccatcacaatctcaaaagcaaggatcttcttcatcatctgccgctataatgaaccccactccagtactcactgttactaaggacgacaaaagcacttctggtgaagatcatgcacatcctactttgctgggggcagtatccgctgttccatcatctcccatttcaaatgcttcaggtacagcagtttcttctgatgtagaaaatggtaatagtaataataacaatatgaatattaatactagtaatactcaggatgcaaaccacgcctcctcacaaagtatcgacattccgagatcatcacactcatttgagagactaccaacacccacaaaacttaaccctgacacagatttagagttaattaagactccccaacgtcattcttcatctagattcgagccatctagatatacgccattaacgaaattgccaaattttaatgaagtttctcctgaagaaagaatccctttgttcattgccaaagttgaccagtgtaacactatgtttgactttaatgatccaagttttgacattcaaggtaaagagattaaaagaagcaccttagatgagctaatagaattccttgtaacaaataggttcacttacacgaatgagatgtacgctcatgtggtgaacatgttcaaaatcaatctgtttagacctattccaccaccagtaaatccagttggtgacatttatgacccagatgaagatgaacctgttaacgaactagcctggcctcatatgcaagctgtttacgaattctttttaaggtttgtggaaagtcctgatttcaatcatcagattgctaaacaatatattgatcaggactttattttaaagttactggaattatttgatagcgaagatatcagagaaagagactgtttgaaaacgacactgcatagaatatatgggaagttcttatcattaagaagctttattcgtcggtcgatgaataatatttttttgcaatttatttatgagactgagaagtttaacggtgtggcagaattgttagaaattttgggttccataattaatggatttgcacttccattaaaggaagagcacaaggttttcttggtgaggatattgataccattacacaaggtccgttgtttatcattataccaccctcagttggcttactgtatcgttcaatttctcgaaaaagatcctttattaaccgaagaggtagttatgggcttactgcgttattggccaaaaataaattccacaaaagagataatgtttctaaatgaaatcgaggatatttttgaagtgatcgaaccgctggaatttattaaagtagaagttccgttatttgttcaattagctaagtgtatttcttctccacatttccaagtggcggaaaaggttttaagttattggaataatgaatatttcttaaacttatgtatcgaaaatgccgaagtcatcctacccattatatttcctgcattatatgaattaacttctcagttagagctagatacagcaaatggcgaagatagcatttcagacccttacatgcttgttgagcaagcaatcaattctggttcgtggaatagggcaattcatgctatggcattcaaggcattgaaaatttttctggaaacaaacccagtattgtacgaaaactgtaatgcattgtacttatcaagtgtaaaagaaactcaacagcgtaaggtgcaacgtgaagaaaattggagcaaacttgaagaatatgtaaaaaatctaaggattaacaatgataaggaccaatacacaatcaaaaacccagaattaagaaacagtttcaacacagcaagtgagaataacacattaaatgaagagaacgaaaatgattgtgacagcgagatacagtga

SEQ ID NO: 10166 - DNA, 2274 bp, Artificial Sequence
  Description of Artificial Sequence: Synthetic polynucleotide
atgatgcgtggtttcaagcaaagattaataaagaagaccaccgggtcttcttcttcttctagcagtaaaaagaaggacaaagagaaggaaaaagaaaaaagttccactacctcttccacatccaagaagcccgcttctgctagtagctcttcccacgggactactcacagttctgccagcagtaccggatccaagtctacaactgagaagggcaagcaatctggtagtgttccctctcaagggaagcatcatagtagctctacaagtaaaacaaaaacagcgacgaccccttcttccagcagcagtagcagtagaagtagtagtgtcagtcgctccggttccagctccacaaagaaaacaagtagtagaaaaggacaagaacagtccaaacaatctcaacagccatctcaatctcaaaagcaaggatcttcttcttcttctgccgctataatgaaccccactccagtactcactgttactaaggacgacaaaagcacttctggtgaagatcatgcacatcctactttgttgggggcagtatccgctgttccatcttctcccatttctaatgcttctggtacagcagtttcttctgatgtagaaaatggtaatagtaataataacaatatgaatattaatactagtaatactcaggatgcaaaccacgcctcctctcaaagtatcgacattccgagaagttctcacagttttgagagattaccaacacccacaaaacttaaccctgacacagatttagagttaattaagactccccaacgtcattcttcttctagattcgagccatctagatatacgccattaacgaaattgccaaattttaatgaagtttctcctgaagaaagaatccctttgttcattgccaaagttgaccagtgtaacactatgtttgactttaatgatccaagttttgacattcaaggtaaagagattaaaagaagcaccttagatgagttgatagaattccttgtaacaaataggttcacttacacgaatgagatgtacgctcatgtggtgaacatgttcaaaatcaatttatttagacctattccaccaccagtaaatccagttggtgacatttatgacccagatgaagatgaacctgttaacgaattggcctggcctcatatgcaagctgtttacgaattctttttaaggtttgtggaaagtcctgatttcaatcatcagattgctaaacaatatattgatcaggactttattttaaagttattggaattatttgatagcgaagatatcagagaaagagactgtttgaaaacgacattgcatagaatatatgggaagttcttatctttaagaagctttattcgtagaagtatgaataatatttttttgcaatttatttatgagactgagaagtttaacggtgtggcagaattgttagaaattttgggttccataattaatggatttgcacttccattaaaggaagagcacaaggttttcttggtgaggatattgataccattacacaaggtccgttgtttatctttataccaccctcagttggcttactgtatcgttcaatttctcgaaaaagatcctttattaaccgaagaggtagttatgggcttattacgttattggccaaaaataaattccacaaaagagataatgtttttgaatgaaatcgaggatatttttgaagtgatcgaaccgttggaatttattaaagtagaagttccgttatttgttcaattagctaagtgtatttcttctccacatttccaagtggcggaaaaggttttaagttattggaataatgaatatttcttaaacttatgtatcgaaaatgccgaagtcatcttgcccattatatttcctgcattatatgaattaacttctcagttagagttagatacagcaaatggcgaagatagcatttctgacccttacatgcttgttgagcaagcaatcaattctggttcttggaatagggcaattcatgctatggcattcaaggcattgaaaatttttttggaaacaaacccagtattgtacgaaaactgtaatgcattgtacttatccagtgtaaaagaaactcaacagcgtaaggtgcaacgtgaagaaaattggagcaaacttgaagaatatgtaaaaaatttaaggattaacaatgataaggaccaatacacaatcaaaaacccagaattaagaaacagtttcaacacagcaagtgagaataacacattaaatgaagagaacgaaaatgattgtgacagcgagatacagtga

SEQ ID NO: 10167 - DNA, 360 bp, Saccharomyces cerevisiae
atgccacatttcaaaagagcagcagtatatgaagagcaaaaaagaactggtaaatggggtcaacttgttgaagaaaccaaagatagaatccccgaatattcgaacaaaactatagcaaagataagccacttggacaatggttgtttgtggcctgagataaaggtctctttttctcatcatttgagcatacttcaatcgatgtgtcttcattttattatttctatacttttctccaaatatatcttcgtttttcttttcgctttccttcttccttctgcctttcctctatttattttgcactccactcttttccgtaaaccttgcctatctattattggatttttgaaaactaaagtataa

SEQ ID NO: 10168 - DNA, 360 bp, Artificial Sequence
  Description of Artificial Sequence: Synthetic polynucleotide
atgccacatttcaaaagagcagcagtatatgaagagcaaaaaagaactggtaaatggggtcaacttgttgaagaaaccaaagatagaatccccgaatattccaacaaaactatagcaaagataagccacttggacaatggttgtttgtggcctgagataaaggtctctttttctcatcatttgagcatacttcaatctatgtgtcttcattttattatttctatacttttctccaaatatatcttcgtttttcttttcgctttccttcttccttctgcctttcctttatttattttgcactccactcttttccgtaaaccttgcttatctattattggatttttgaaaactaaagtatga

SEQ ID NO: 10169 - DNA, 624 bp, Saccharomyces cerevisiae
atgcgcgtttttactttgattgcgattttgtttagttcatctttgttaacacatgcattctcctctaattatgctcctgtaggcatatcattacctgcttttaccaaagaatgtctttactatgatttatcctctgataaagatgtccttgtggtcagttaccaagttttgacaggtgggaatttcgagatagacttcgatattaccgcccctgatggctctgttatcgtcactgaaagacaaaagaagcattctgattttctactgaagtcgtttggtataggtaagtacactttctgtttgagtaataactacggcacttccccaaagaaagttgaaatcaccctcgaaaaggaaaaggaaattgtttcttcccatgaaagcaaagaggacataatcgcaaacaacgccatcgaggaaattgataggaacctgaataagatcaccaaaacaatggattatttaagggctagagaatggagaaacatgtatactgtgagttctactgagtcaagattaacatggctctcattactaattatgggggtaatggttggtatcagtatagtgcaggcattaattattcagttcttttttaccagtcgccaaaaaaactacgtatag

SEQ ID NO: 10170 - DNA, 624 bp, Artificial Sequence
  Description of Artificial Sequence: Synthetic polynucleotide
atgcgcgtttttactttgattgcgattttgtttagttcttctttgttaacacatgcattctcctctaattatgctcctgtaggcatatctttacctgcttttaccaaagaatgtctttactatgatttatcctctgataaagatgtccttgtggtcagttaccaagttttgacaggtgggaatttcgagatagacttcgatattaccgcccctgatggctctgttatcgtcactgaaagacaaaagaagcattctgattttttattgaagagctttggtataggtaagtacactttctgtttgagtaataactacggcacttccccaaagaaagttgaaatcaccctcgaaaaggaaaaggaaattgtttcttcccatgaaagcaaagaggacataatcgcaaacaacgccatcgaggaaattgataggaacttgaataagatcaccaaaacaatggattatttaagggctagagaatggagaaacatgtatactgtgagttctactgagagcagattaacatggctctctttattgattatgggggtaatggttggtatcagtatagtgcaggcattaattattcagttcttttttaccagtcgccaaaaaaactacgtatga

SEQ ID NO: 10171 - DNA, 2403 bp, Saccharomyces cerevisiae
atggggttctacaactgtagattcctgtccagacgtctatctgttgagccttgcagaataggtagcgccgctaaaagctatcaacagcgatcgatttatcactttggcgctgctctcacaaatgcccctagtggaagagaaacaccagacaagctacgttctgacctgcatagtgctttagagatggtcgatgaaatatatgacacaaattcgactgtagaggacattggaaacaaggaaaagggaggtcgacaaaaatatacggaagaaatggacaaggcgattaatctactgaaaacaaatataaagaaggagtatagacatgataagtatttggagcggacaaaggtaggaacgtatcctggtagaagaacatatcctggtaggagaacatatcccgctaggagaacatatcccgctagcagaacatattcagatagcaattcatacacttttcggataaatgtccagaagattaggcacgcattagtacgttacaatcaagatggtgttcaaaaacacaaccaaaagcctcctaggattggtcatggattaacgagagtgttataccaaccgttgtcgctacaaaaattgagagataataggagcagaatgtataattttgaccctgcagtggaaaatattaatccagagtatttggaaaagaaaagtgaaaaagatgtgaacacagactcctctggagaaggacaaagcaagccaatattcatcacaccccacaaagatgaatctctgttaaaggttgccaaagaacatagaaaaaagtacatatcttcatcaagttccatgacatcagtactttctcagttgcactatttattatccaatttcagaagattgaatatcattgattcctcgatatcgaaaaattttcctcaaaaaaactgcaattattcagaaagtgcatattttccgtcagcagtcattctgagaaagaagagaaatggcatttgttctattgattcagatagaagtctggatagggagattgtgctttctgtactaggtcattatcttgaagactttttaacggaaaagtccctgaagaatagttcaaaaagtgaaaattatcactattctagtatagatgaattcattgtgagatctcaattggacgcgtacgacccaaatctacctggaacgggtgtatttgatctgaagacaagagcagtttctgccataagatacgatttatcacatgtagagagtaataacaaccaaactggatatgagatagataaagtttatggggaatttgagtctttggaaagagaatattttgaactaatcaggtctgcccttctaaagtattctttgcaagctagaattggcaaaatggacggtattttcgttgcataccacaatatttctaagatgtttggattccaatatctacctttggacgaattagattatataatccattcttcgtataacagcaaattcgacagtttgttaaaggagaagaatgatatcacaaaagggatatatggtgaggaggactacattctacactatgacagggacgataggaaaattgcttgcttggtggctaatagggaatttaagatgtctatgaatctgttcagtaatattttgaaacacgttgagcagttacttaactcaagtaatacgaaatgggaaaaatgcaaaataatgcttaaaaccgaagttgaagaaaaacgatccaaaagtggccgcttctttaacgaaccggtgctaaatattgtagccctgccgttgtcacctgagtacgaggataaatctttattggtaaaggatacttcgaacgaacaattaacagaggagctactaaacctccgctcatataacgaaaatcttttggaggaacacctgaattccttagttggatttaaagtaaatgtcaagcatttctatcaccatcatcctaatactacacatctacctgattttgctttaaaaaagaacgatattctcgacaccgaatcccgtaaatatatttctgacatgatgaaacgagactggtacaaagatataccatctacacagactccaaactttttccacgcttccgatgtttccacttgggaggtgaactctacttttacagatatcaatgacaaacaaattttacgaaaactatactttaaatatttggatgttaaattaaacgcattgaaaaatcaagtaatcacacgtcaggaacctgatatgtctaaaaaggatgaaattatgaatcgaatcaaatcactacaagcccgcaatgatcaccgcgataatggaagtaacaaaagatattctaattttggccctacccgactgcaaactaaactgcgcgcatatgctaaaaaaggtgcccttcgaagaaaactattagaaaggagtaacaagttccatatctag

SEQ ID NO: 10172 - DNA, 2403 bp, Artificial Sequence
  Description of Artificial Sequence: Synthetic polynucleotide
atggggttctacaactgtagattcttatccagacgtttatctgttgagccttgcagaataggtagcgccgctaaaagctatcaacagagatctatttatcactttggcgctgctctcacaaatgcccctagtggaagagaaacaccagacaagttgcgttctgacttgcatagtgctttagagatggtcgatgaaatatatgacacaaattctactgtagaggacattggaaacaaggaaaagggaggtagacaaaaatatacggaagaaatggacaaggcgattaatttattgaaaacaaatataaagaaggagtatagacatgataagtatttggagagaacaaaggtaggaacgtatcctggtagaagaacatatcctggtaggagaacatatcccgctaggagaacatatcccgctagcagaacatattctgatagcaattcttacacttttagaataaatgtccagaagattaggcacgcattagtacgttacaatcaagatggtgttcaaaaacacaaccaaaagcctcctaggattggtcatggattaacgagagtgttataccaaccgttgtccttacaaaaattgagagataataggagcagaatgtataattttgaccctgcagtggaaaatattaatccagagtatttggaaaagaaaagtgaaaaagatgtgaacacagactcctctggagaaggacaaagcaagccaatattcatcacaccccacaaagatgaatctttattaaaggttgccaaagaacatagaaaaaagtacatatcttcttccagttccatgacatctgtactttctcagttgcactatttattatccaatttcagaagattgaatatcattgattcctccatatccaaaaattttcctcaaaaaaactgcaattattctgaaagtgcatattttccgagtgcagtcattttaagaaagaagagaaatggcatttgttctattgattctgatagaagtttggatagggagattgtgctttctgtattgggtcattatcttgaagactttttaacggaaaagtccttgaagaatagttctaaaagtgaaaattatcactattctagtatagatgaattcattgtgagatctcaattggacgcgtacgacccaaatttacctggaacgggtgtatttgatttgaagacaagagcagtttctgccataagatacgatttatctcatgtagagagtaataacaaccaaactggatatgagatagataaagtttatggggaatttgagtctttggaaagagaatattttgaattgatcaggtctgcccttttgaagtattctttgcaagctagaattggcaaaatggacggtattttcgttgcataccacaatatttctaagatgtttggattccaatatttacctttggacgaattagattatataatccattcttcttataacagcaaattcgacagtttgttaaaggagaagaatgatatcacaaaagggatatatggtgaggaggactacattttacactatgacagggacgataggaaaattgcttgcttggtggctaatagggaatttaagatgtctatgaatttattcagtaatattttgaaacacgttgagcagttacttaacagtagtaatacgaaatgggaaaaatgcaaaataatgcttaaaaccgaagttgaagaaaaaagatccaaaagtggccgcttctttaacgaaccggtgttgaatattgtagccttaccgttgtctcctgagtacgaggataaatctttattggtaaaggatacttctaacgaacaattaacagaggagttattaaacctccgctcttataacgaaaatcttttggaggaacacttgaattccttagttggatttaaagtaaatgtcaagcatttctatcaccatcatcctaatactacacatttacctgattttgctttaaaaaagaacgatattctcgacaccgaatcccgtaaatatatttctgacatgatgaaaagagactggtacaaagatataccatctacacagactccaaactttttccacgcttccgatgtttccacttgggaggtgaactctacttttacagatatcaatgacaaacaaattttaagaaaactttactttaaatatttggatgttaaattaaacgcattgaaaaatcaagtaatcacacgtcaggaacctgatatgtctaaaaaggatgaaattatgaatagaatcaaatctttacaagcccgcaatgatcaccgcgataatggaagtaacaaaagatattctaattttggccctaccagattacaaactaaattgcgcgcatatgctaaaaaaggtgcccttagaagaaaattattagaaaggagtaacaagttccatatctga

SEQ ID NO: 10173 - DNA, 2514 bp, Saccharomyces cerevisiae
atgttttcatcatcatctcgaccttcaaaagagccattactatttgacatcagacttagaaatttggacaatgatgttttactgataaaaggcccccctgatgaggcatcttctgtcctactatctggaactatagtattgtcaattactgagccaattcaaatcaagtctttggctttgagactttttggtaggttgagactaaatattccaacggttttacaaactgttcatgggccgcataagcgatactcaaagtttgagagaaacatatattctcatttttgggatgattttaatataaaaagttatttccaaaacttgtacgataatcataataatggtaaaataacaatttctagtaaatcctcaacaaatttagcagcattgccaaagagaaaaagagccctttctactgcatcattgatatcaagtaatgggcagacaagcgcaagcaaaaactatcacaccttagtaaaaggtaactacgaattccctttcagcgcgattattcctgggtcattagtggaaagtgtagaaggcctaccaaatgctgccgtcacttatgctctggaagctactatcgagagacctaagcagcccgacttgatctgtaaaaaacatctaagagttattcgaacgttagctatagatgcagtcgagttatctgaaacagtatcagtggataactcatggcctgaaaaagtcgattatacgatctccattccaactaaggcaattgccattggctcttccaccatgatcaatattttaattgttcctatattaaaaggattgaagttaggccctgttaggatcagtttggtggaaaattcccagtattgtggtagctatggaggggttatcaaccaagaaagaatggtggctaaattaaaactaaaagatcccctgaagcacgttgcccaaataaagaagaagaggagcctaaatgaagctgccgacgaaggggttgatacggacacaggggaatttcaagataaatgggaagttcgagctttattaaacatacctgcaagcctgactaaatgctcccaagactgtcgcattttatctaatatcaaagtccgtcataagatcaagttcactataagtttactcaatccggacggtcatatttcagaattgcgtgcggcactgcctgtccaattattcatttcaccgtttgttccagtcaatgtaaagacctccgatgttattgaaagaacgctcaaaacgtttggaccctcatatcaagtaacaagtcagcacgataattcattcagcagcaaaaactttgtagacgatagtgaagaagatgtgatttttcaaagatctgcttctgcgttacaattgtcttcaatgccaaccatagtatctggctctactttaaatatcaatagtactgatgcagaggctaccgcagtcgctgacacaactatggtaactagtttgatggtacctcccaactacggcaatcacgtttacgatcgagtgtatggcgaggtaactaatgaagacgaaacttcagcatcagcttcttcaagtgccgtcgaatcacaggcaattcacaatattcaaaacctatatatatcggatagtaacaatagcaataatcctattttggcaccaaatcctcaaatcaagattgaagatgatagcctaaataattgtgactctcgaggggacagcgttaacaatagtaacctgaatctggttaatagtaatctaacaattagtgaaaattggaacaataactctccttctgcaaatagatataataacatcattaatgctggattgaatagtccttcactgacaccaagctttgcacatttatctaggcgtaactcatatagtcgccaaacatcttctacatcgctgaagaacgatttggaactgacagatttaagcagagttccctcgtatgataaagcaatgaaatctgatatgattggtgaggatcttccaccggcttatcccgaggaagaacttggagttcaagaaaataaaaaaattgaactagaaaggccacaaattcttcatcacaagtctacatcctctttgttgccacttccaggctcgagcaagagttccaataatctgaaaagatcgtctagtaggacacatttatcccactctccattaccaaggaataatagcggatcctcagtatcattgcagcagttggcgagaaacaacacagatagttcatttaatctaaatctctctttcacttcagcaaaaagcagcacaggaagcagacattttccgtttaatatgacaacatctttcactagtaattcaagttccaagaacaattcacattttgataaaactgattctacatctgacgctaataagccaagagaagaggaaaactatacgagcgcaacccacaatcgaaggtcacgctcatcgtcagttcggagcaacaatagcaactcaccattaagacaaggaacaggttcatttgctaatttaatggagatgttcacaaaacgggatcgctcatag

SEQ ID NO: 10174 - DNA, 2514 bp, Artificial Sequence
  Description of Artificial Sequence: Synthetic polynucleotide
atgttttcttcttcttctagaccttccaaagagccattactttttgacatcagacttagaaatttggacaatgatgttttattgataaaaggcccccctgatgaggcatcttctgtcttgttatctggaactatagtattgtctattactgagccaattcaaatcaagtctttggctttgagactttttggtaggttgagattgaatattccaacggttttacaaactgttcatgggccgcataagagatactccaagtttgagagaaacatatattctcatttttgggatgattttaatataaaaagttatttccaaaacttgtacgataatcataataatggtaaaataacaatttctagtaaatcctctacaaatttagcagcattgccaaagagaaaaagagccctttctactgcaagtttgatatctagtaatgggcagacaagcgcaagcaaaaactatcacaccttagtaaaaggtaactacgaattccctttcagcgcgattattcctgggtctttagtggaaagtgtagaaggcttaccaaatgctgccgtcacttatgctttggaagctactatcgagagacctaagcagcccgacttgatctgtaaaaaacatttaagagttattagaacgttagctatagatgcagtcgagttatctgaaacagtatctgtggataacagttggcctgaaaaagtcgattatacgatctccattccaactaaggcaattgccattggctcttccaccatgatcaatattttaattgttcctatattaaaaggattgaagttaggccctgttaggatcagtttggtggaaaattcccagtattgtggtagctatggaggggttatcaaccaagaaagaatggtggctaaattaaaattgaaagatcccttgaagcacgttgcccaaataaagaagaagaggagcttgaatgaagctgccgacgaaggggttgatacggacacaggggaatttcaagataaatgggaagttagagctttattaaacatacctgcaagcttaactaaatgctcccaagactgtcgcattttatctaatatcaaagtccgtcataagatcaagttcactataagtttactcaatccggacggtcatatttctgaattgcgtgcggcattacctgtccaattattcatttctccgtttgttccagtcaatgtaaagacctccgatgttattgaaagaacgctcaaaacgtttggaccctcttatcaagtaacaagtcagcacgataattctttcagcagcaaaaactttgtagacgatagtgaagaagatgtgatttttcaaagatctgcttctgcgttacaattgtcttctatgccaaccatagtatctggctctactttaaatatcaatagtactgatgcagaggctaccgcagtcgctgacacaactatggtaactagtttgatggtacctcccaactacggcaatcacgtttacgatagagtgtatggcgaggtaactaatgaagacgaaacttctgcatctgcttcttccagtgccgtcgaatctcaggcaattcacaatattcaaaacttatatatatctgatagtaacaatagcaataatcctattttggcaccaaatcctcaaatcaagattgaagatgatagcttgaataattgtgactctagaggggacagcgttaacaatagtaacttgaatttggttaatagtaatttgacaattagtgaaaattggaacaataactctccttctgcaaatagatataataacatcattaatgctggattgaatagtccttctttaacaccaagctttgcacatttatctaggcgtaacagttatagtcgccaaacatcttctacatctttgaagaacgatttggaattaacagatttaagcagagttccctcttatgataaagcaatgaaatctgatatgattggtgaggatcttccaccggcttatcccgaggaagaacttggagttcaagaaaataaaaaaattgaattggaaaggccacaaattcttcatcacaagtctacatcctctttgttgccacttccaggcagtagcaagagttccaataatttgaaaagatcttctagtaggacacatttatcccactctccattaccaaggaataatagcggatcctctgtatctttgcagcagttggcgagaaacaacacagatagttcttttaatttgaatctctctttcacttctgcaaaaagcagcacaggaagcagacattttccgtttaatatgacaacatctttcactagtaatagtagttccaagaacaattctcattttgataaaactgattctacatctgacgctaataagccaagagaagaggaaaactatacgagcgcaacccacaatagaaggtctcgcagctcttctgttaggagcaacaatagcaactctccattaagacaaggaacaggttcttttgctaatttaatggagatgttcacaaaaagagatcgctcctga

SEQ ID NO: 10175 - DNA, 2193 bp, Saccharomyces cerevisiae
atgatttctgtttgcccacaaaatgacttgcaaaaatgctacagaagcctcacattcgatgttccaggacaacaattcgaagagagaaatgaacaaaaccttaaaaaacgggccaaaaagaaaggcagtttccaaccatctgttgcctttgacacagtgccttccaccgctggttattcttctatagacgacagcagggaaggattcaaaggtgtacctgttcccaactattacacgatggaagagtgctatgacgatgaaacagactctttttcgccaaatttgcaatattatttgagagatacattccaatcatcaccttttctgaatactagaaaagagaacaaatctgaatccagtagttttccaatgagatcctcaaagttgttggaaaagaattctgacatcaaaaaatatttcttggtatccaagaatggaaaaatagtgaggagagactatccaagcacgccagtaattgtcaacgaaacgttgatgataaacaggtttgaaaagaactggataaagttatggcgccaaagaaaactacaaataaatgaaaggctgaatgacaaaaaaaaatggtttacttacccagaacttatcttctctgaagagcgtattaaaccgttatatagaggagatgatagtgcaccatgtacaaaagaacaaaaaagaaagcataaaatacttcaacaaaaggtcggatatcccaataaccctaagacaatagtttgtcacattaacggaaaaaaacatacgtgggttgccctagactggacagtctacaagtttgcacgaaatcttgatcacattgttgtcataactacactgccaaaaatgatttctaacaggaaaaaaactgcaaaagatgatacagaatgggcaccgggatatcaaaaagaagtaatagatcaaaaattaaacgacatttttgattatattttacagctagtaaaagtggtcaaaatatccgtcaaaattactttagaaataattgtaggcaaaattaaaaaaagtctggtagatgtcattaatgtccatactccagatttcttagttcttgctactttaaagcacgagcgaaatgagaatcttattacatataaatccaaaaagctgacagatgtctttcctgttagttatccgattcccacatttgttgttccctcgaaacgaatgtattcgttcgaactgaatctacaaagagaagtaaatgaacattatgtctcaaaaaatcatatgaagcacgaacacactgacgttgagagcatgagcagttcaatgttcaaaaaaaatacaatatcagatatttcttcacatatttccgtagattcgtacgccgaagatttcaaaaggcaaggctacatcaaaaagcagttcaacacctctaatgattccattccaagaaaattgaccggtctcgcccagcattcaagaaggaagatcacgggtgatatagaaaaattacaagacgatgagaaagatagagaatgtactaaggaaaaacttttgttgaagaaaattgatatcataattagagagtcattgaagtcttctttagcgatagagacgttgcctggtaaaaatgtatcgcagtccagtcacggtgaccaaatttccagctttaagaatgctttgataggcaatgggtcgaaaaacacaaagtttagaaaatctttaataccatattcttcctcagaggaacaaaataccacaacaactattaaactcagtagctcgcctacgtcccaaatcaagtttgcaacctctgtaaaacacaaagatggaagagccgcccttggcaaagccagaaatctgcctgatataaggcacagtatttccttcgacaaagaaaattcctttgatccatctgataaaagcagtagtgttgataatagcattcctttgaggaaagttaaaagtgccggtgcgttaagaaaagtcaaaactaatgactcctcaagtagtgcagggtcaaagaaaagctcgtctagttttagtactgtgaacaccttcactgggggtggagttgggatttttaaggtgtttaaaagtggaagttcctctggaaataaatcatccagtagaaggaatagtagcagtggcgatgtttttgaaagtgatgatcgtaacgacaagaaaaagaagaagaaaaaaaagaagaaatcattgttcttattcggcaaaatatga

SEQ ID NO: 10176 - DNA, 2193 bp, Artificial Sequence
  Description of Artificial Sequence: Synthetic polynucleotide
atgatttctgtttgcccacaaaatgacttgcaaaaatgctacagaagcctcacattcgatgttccaggacaacaattcgaagagagaaatgaacaaaaccttaaaaaaagagccaaaaagaaaggcagtttccaaccatctgttgcctttgacacagtgccttccaccgctggttattcttctatagacgacagcagggaaggattcaaaggtgtacctgttcccaactattacacgatggaagagtgctatgacgatgaaacagactctttttctccaaatttgcaatattatttgagagatacattccaatcttctccttttttgaatactagaaaagagaacaaatctgaatccagtagttttccaatgagatcctccaagttgttggaaaagaattctgacatcaaaaaatatttcttggtatccaagaatggaaaaatagtgaggagagactatccaagcacgccagtaattgtcaacgaaacgttgatgataaacaggtttgaaaagaactggataaagttatggcgccaaagaaaattacaaataaatgaaaggttgaatgacaaaaaaaaatggtttacttacccagaacttatcttctctgaagagcgtattaaaccgttatatagaggagatgatagtgcaccatgtacaaaagaacaaaaaagaaagcataaaatacttcaacaaaaggtcggatatcccaataaccctaagacaatagtttgtcacattaacggaaaaaaacatacgtgggttgccttggactggacagtctacaagtttgcaagaaatcttgatcacattgttgtcataactacattaccaaaaatgatttctaacaggaaaaaaactgcaaaagatgatacagaatgggcaccgggatatcaaaaagaagtaatagatcaaaaattaaacgacatttttgattatattttacagttggtaaaagtggtcaaaatatccgtcaaaattactttagaaataattgtaggcaaaattaaaaaaagtttagtagatgtcattaatgtccatactccagatttcttagttcttgctactttaaagcacgagagaaatgagaatcttattacatataaatccaaaaagttaacagatgtctttcctgttagttatccgattcccacatttgttgttccctctaaaagaatgtattctttcgaattgaatttacaaagagaagtaaatgaacattatgtctccaaaaatcatatgaagcacgaacacactgacgttgagagcatgagcagttctatgttcaaaaaaaatacaatatctgatatttcttctcatatttccgtagattcttacgccgaagatttcaaaaggcaaggctacatcaaaaagcagttcaacacctctaatgattccattccaagaaaattgaccggtctcgcccagcattccagaaggaagatcacgggtgatatagaaaaattacaagacgatgagaaagatagagaatgtactaaggaaaaacttttgttgaagaaaattgatatcataattagagagtctttgaagtcttctttagcgatagagacgttgcctggtaaaaatgtatctcagtccagtcacggtgaccaaatttccagctttaagaatgctttgataggcaatgggtctaaaaacacaaagtttagaaaatctttaataccatattcttcctctgaggaacaaaataccacaacaactattaaactcagtagctctcctacgtcccaaatcaagtttgcaacctctgtaaaacacaaagatggaagagccgcccttggcaaagccagaaatttacctgatataaggcacagtatttccttcgacaaagaaaattcctttgatccatctgataaaagcagtagtgttgataatagcattcctttgaggaaagttaaaagtgccggtgcgttaagaaaagtcaaaactaatgactcctccagtagtgcagggtccaagaaaagctcttctagttttagtactgtgaacaccttcactgggggtggagttgggatttttaaggtgtttaaaagtggaagttcctctggaaataaatcttccagtagaaggaatagtagcagtggcgatgtttttgaaagtgatgatcgtaacgacaagaaaaagaagaagaaaaaaaagaagaaatctttgttcttattcggcaaaatatga

SEQ ID NO: 10177 - DNA, 321 bp, Saccharomyces cerevisiae
atgtccacccttttgaagtctgctaaatctatcgttccattgatggaccgtgtccttgtccaaagaatcaaggcacaagcaaagacagcatccgggttgtatttacctgaaaagaacgtggagaagttaaaccaagctgaagttgttgccgtaggcccgggctttactgatgctaatggtaataaggttgttcctcaagttaaagttggtgaccaagttttgattccacagtttggtggttctaccattaaattgggtaacgacgatgaagttattcttttcagggacgctgaaatcctggctaagattgccaaggactaa

SEQ ID NO: 10178 - DNA, 321 bp, Artificial Sequence
  Description of Artificial Sequence: Synthetic polynucleotide
atgtccacccttttgaagtctgctaaatctatcgttccattgatggaccgtgtccttgtccaaagaatcaaggcacaagcaaagacagcatccgggttgtatttacctgaaaagaacgtggagaagttaaaccaagctgaagttgttgccgtaggcccgggctttactgatgctaatggtaataaggttgttcctcaagttaaagttggtgaccaagttttgattccacagtttggtggttctaccattaaattgggtaacgacgatgaagttattcttttcagggacgctgaaatcttggctaagattgccaaggactga

SEQ ID NO: 10179 - DNA, 273 bp, Saccharomyces cerevisiae
atgggtgctgcatacaaagtatttgggaagacggttcaacctcacgtattggctatatctacgtttatcgctactgctgcagtggcatcttactttaccacgaaaccaaaaaccaaaaatgaaggcaagaatagttctgccttgagccaacaaaaaagcggtgaaagttcaaactcagatgctatgggaaaggacgatgatgtcgtaaagagtattgaaggatttttaaatgatttagagaaagatacgaggcaggatacgaaagccaactga

SEQ ID NO: 10180 - DNA, 273 bp, Artificial Sequence
  Description of Artificial Sequence: Synthetic polynucleotide
atgggtgctgcatacaaagtatttgggaagacggttcaacctcacgtattggctatatctacgtttatcgctactgctgcagtggcatcttactttaccacgaaaccaaaaaccaaaaatgaaggcaagaatagttctgccttgagccaacaaaaaagcggtgaaagtagtaacagtgatgctatgggaaaggacgatgatgtcgtaaagagtattgaaggatttttaaatgatttagagaaagatacgaggcaggatacgaaagccaactga

SEQ ID NO: 10181 - DNA, 642 bp, Saccharomyces cerevisiae
atgaagtacattattgagcatatggaggaagggtttagtgaatgggtcattttagagtatagccaaatcctgagagaagtaggagctgaaaacttgattttatcatcgttaccagagagtaccacggaaaaggacatccctcaaaggctactaaaacttggtttaagatggactacaaaggatttgaagggcattaacgaagatttcaaggatttggaactgttaaaagatggcagagtctgtctattggaccctagggctacaatcgatttacagccggaggatgctacgaaattcgactatttcgtatttggtggcatattgggtgatcatcctccaagagatcgtaccaaagaactaaagactgcctatccgaatcttttaattagcagaagactaggtgataaacaaatgactacggatactgccataagaacaacacagttgattatcaaagacaggattgcatttgaagacatcaagttcattgactaccctgaatttaggttcaataaaaatgaggccacggaaatgccatttagatacgttttagataaagaaggtaaacctattttgcctgaagggatgttggatttgatcaagaaggattctgctcaaagtttggacgatctgttgatgtag

SEQ ID NO: 10182 - DNA, 642 bp, Artificial Sequence
  Description of Artificial Sequence: Synthetic polynucleotide
atgaagtacattattgagcatatggaggaagggtttagtgaatgggtcattttagagtatagccaaatcttaagagaagtaggagctgaaaacttgattttatcttctttaccagagagtaccacggaaaaggacatccctcaaaggcttttgaaacttggtttaagatggactacaaaggatttgaagggcattaacgaagatttcaaggatttggaattattaaaagatggcagagtctgtttgttggaccctagggctacaatcgatttacagccggaggatgctacgaaattcgactatttcgtatttggtggcatattgggtgatcatcctccaagagatcgtaccaaagaattgaagactgcctatccgaatcttttaattagcagaagattaggtgataaacaaatgactacggatactgccataagaacaacacagttgattatcaaagacaggattgcatttgaagacatcaagttcattgactaccctgaatttaggttcaataaaaatgaggccacggaaatgccatttagatacgttttagataaagaaggtaaacctattttgcctgaagggatgttggatttgatcaagaaggattctgctcaaagtttggacgatttattgatgtga

SEQ ID NO: 10183 - DNA, 2148 bp, Saccharomyces cerevisiae
atgctacggtttactcatcgaggccttccctccagcactcgttttagaaacattttcgtaaggttaaatcacatttatgtaccatggttctatgccatagacgtacccaactccaaaccctatttacccacatatcaaactttacactcacccaaaaagtttaagccgttctccgttgatgattctaatcgtttggaaaaggccagtaagcgtcaagaacgcaggcctgttttagtcaacgaagattacctgtttaaagtcgacctctctcacatggaattgtcccctacctattgggaaggccctacttatcaagtacgaagaggtgtgtggttcgactcttcaaatcaacctttgtccagtgatcttacctccgaaattgaagggttgtataagcagctcaaattcgacgacagtaatgatgatccgaccacgacacctcctgcagaatcgcaagatatatttaggctcaaaggtaaatacccagtcgataaagaaaacgaaggagagcaaaaaaatggatccagcaataaagatgagaacgaatctactttcaagtttattttgtttgccaataaacaaactgcatttttactatcggatttagatggaggaaaactgcaattagcctttctaaggtctaatctggctcaatccttaccgattaatgctacaatgattacaagatcatacaaatattcatcctccgcaactactaaacagacatccacatcttttaaggcagcaaaaacgcctcaaacggaagtagcagatggtagtaacagttccaaatcgaggagcattgaaacaaagttagaaaagaaagtttcaaacctcttcaatttatcggactttttacagttgttcaatggtaatgctagtaaagatcaagatgatgcacagagcttggaaaagcaaatggaaacagactataacaatgcagataacagtcaaggcgctaatgctagtagcaaaatagaagatggcaaaaattcgggcgcaagcgatagacaaattagaagtaacagaagagatgtggataacttgatactatgcgttcacggtataggtcagactttgggtaagaagtacgaatacgtaaatttcgcacacacggtaaatctacttaggtctaatatgaaaaaaatctacaataattctgagaaactacaatcattaaacacagcacctgattataaaagcaactgtaacgttcaagtgctacccatcacctggaggcactcgataagtttccaaacggatgctaaggaggaaaatatagaaaatcctgacctaccgactttgtcacaagtcacagtaaatggagtgttacccttgaggaagctactggctgacggtctactagatattttgttgtatgtcgaaccatactaccaagatatgattctacaacaagtaacctctcaattgaacaaaacatatcggatttttaaagaatttaatccagagtttgatgggaaagtccatttagtgggccattcgttgggtagtatgatattatttgatattctatccaaacaaaaaaaatatgaattagaatttcaagtagacaacctgttctttattggctcaccaattggattgttaaagttaattcaaagaacaaaaattggtgaccgtcccgaatttcccaatgacttggagagaaaattaaccgtacagagaccgcaatgtaaggacatttataatgtttaccacgtctgtgatcccatttcttataggatggaacctcttgttagtaaagaaatggctcattacgaacaaacttatttaccacattgtagtgaagcttatggactaacttctaaagttttggaatttggcgaaaacatatggaaagatttgccaggtactgatgaaaataatttgcagtccaaaaaaacttctccagaaaaaaaagaggtcaagttatcagaaaatcttacgagaatgcttacaggtttgaattacaccggacgtctagattatgctatgtctccaagtctgctagaagtggattttatatcagctataaaatcacatgtttcttatttcgaagaaccggatattgcagcgtttatcctaaaagaaattttaagtaaacatgaaaatgcatcagaaatatatgtaaaaagaaagactggttga

SEQ ID NO: 10184 - DNA, 2148 bp, Artificial Sequence
  Description of Artificial Sequence: Synthetic polynucleotide
atgttgagatttactcatcgtggccttccctccagcactcgttttagaaacattttcgtaaggttaaatcacatttatgtaccatggttctatgccatagacgtacccaactccaaaccctatttacccacatatcaaactttacactcccccaaaaagtttaagccgttctccgttgatgattctaatcgtttggaaaaggccagtaagcgtcaagaacgcaggcctgttttagtcaacgaagattacttgtttaaagtcgacctctctcacatggaattgtcccctacctattgggaaggccctacttatcaagtaagaagaggtgtgtggttcgactcttccaatcaacctttgtccagtgatcttacctccgaaattgaagggttgtataagcagctcaaattcgacgacagtaatgatgatccgaccacgacacctcctgcagaatctcaagatatatttaggctcaaaggtaaatacccagtcgataaagaaaacgaaggagagcaaaaaaatggatccagcaataaagatgagaacgaatctactttcaagtttattttgtttgccaataaacaaactgcatttttattaagtgatttagatggaggaaaattacaattagcctttttaaggtctaatttggctcaatccttaccgattaatgctacaatgattacaagatcttacaaatattcttcctccgcaactactaaacagacatccacatcttttaaggcagcaaaaacgcctcaaacggaagtagcagatggtagtaacagttccaaatctaggagcattgaaacaaagttagaaaagaaagtttctaacctcttcaatttaagtgactttttacagttgttcaatggtaatgctagtaaagatcaagatgatgcacagagcttggaaaagcaaatggaaacagactataacaatgcagataacagtcaaggcgctaatgctagtagcaaaatagaagatggcaaaaatagtggcgcaagcgatagacaaattagaagtaacagaagagatgtggataacttgatattgtgcgttcacggtataggtcagactttgggtaagaagtacgaatacgtaaatttcgcacacacggtaaatttacttaggtctaatatgaaaaaaatctacaataattctgagaaattacaatctttaaacacagcacctgattataaaagcaactgtaacgttcaagtgttacccatcacctggaggcactccataagtttccaaacggatgctaaggaggaaaatatagaaaatcctgacttgccgactttgtctcaagtcacagtaaatggagtgttacccttgaggaagttattagctgacggtttattagatattttgttgtatgtcgaaccatactaccaagatatgattttacaacaagtaacctctcaattgaacaaaacatatagaatttttaaagaatttaatccagagtttgatgggaaagtccatttagtgggccattctttgggtagtatgatattatttgatattttatccaaacaaaaaaaatatgaattagaatttcaagtagacaacttgttctttattggctctccaattggattgttaaagttaattcaaagaacaaaaattggtgaccgtcccgaatttcccaatgacttggagagaaaattaaccgtacagagaccgcaatgtaaggacatttataatgtttaccacgtctgtgatcccatttcttataggatggaacctcttgttagtaaagaaatggctcattacgaacaaacttatttaccacattgtagtgaagcttatggattaacttctaaagttttggaatttggcgaaaacatatggaaagatttgccaggtactgatgaaaataatttgcagtccaaaaaaacttctccagaaaaaaaagaggtcaagttatctgaaaatcttacgagaatgcttacaggtttgaattacaccggacgtttggattatgctatgtctccaagtttattggaagtggattttatatctgctataaaatctcatgtttcttatttcgaagaaccggatattgcagcgtttatcttgaaagaaattttaagtaaacatgaaaatgcatctgaaatatatgtaaaaagaaagactggttga

SEQ ID NO: 10185 - DNA, 1701 bp, Saccharomyces cerevisiae
atgatgagtcccgcccaagataaactgcagcaccagcatcataatcctaattcttcctcatcgtcatcctctaagatgacgaacgtttatcaggttaccacgccaaagtctcctcaggatttggaaaacaacatggatgagcccttcaaaatggacaccgccaccagtaatccggacaaggatagcgaaaatacccagcggttgaagtacgaatgtgccaaaggggaaatacagaatgttttgaacctacatataatgctaaaccacaagcatgttaggcacttacgaagaaatgttcaaaaggttaacgcaaaactagctctcttggaaaccctgcataaggatactggtctattgaacaaaatcgaacggacgtatcaactcaaaataaaacaacatcagcagcatagcgtgctcggcggccactttcacgacagtacggctacggaaaatacgaacgcatcaaattataacctgtcatacccggttctatcggattataacatcaactgtcagcctttgtcttcgagcagcaacagaaatctgtcaacaacacgcataccacaccaccattatcatactagaagcaagagtaacgggcttttgctagaaccttctgccctccgtccggcaaattcgaatataattgattacaggctaacaggttctaaatctctatcagaagccataaccaagcccactcccgtctcgcttcctcactctaattcggatggcatttcttcacctcgttcctcctcaatctcccccttagacgagcagccggggttccagatactcccttttaaaccaagtcagatgcatcttaaccacagacgtaattacagtagcacttgtttgacgagcaatagcggtatcatcggtaagactgaaaataatgagcccatttttagaagatatgacggcattttggttataattacgtgctccaaatgtgaccgttccggtttcacttccgcgcaaggtatcgtgaaccatactcgactaaaacattctaaactatattcaagccaaccattggcagttttaaacaaccaaaaactacttcctaatgataagcaggatccggaaattttatctaagttcaagaaactaaatttggacccaaacaaagactacctaccctctgacattgcaatcccaaaaccacaatcaccaatcaaccactccgagaaccatacgcgggctccaaagactgtcaagaacactcctcatttagaaaaactataccaaaataaagaagacttcaaaaaactgattgacatggttaatgaaactccggatgatttgaatgaatatttgaagcaacgtgaaattcaattaagatatcaaaaggagcaagaagaggaatcttccaaatctgatgacgaagcttcttacgtcccatcaccgtctctctcagcaacggctacaacaacaacgactacggacccaccctctccgccagtgctatcctcctccttacaaagaaaattgctgcgtaagagaaaactgagcttgaatagctctactcccatggaagatttacctttaagagaaaggttgagagcaaatcccactgacaagaaaccaagaaaagcggcccttttgactaatgaacttgagggtcctgatcctgcagcaaaatcatcatcttattacaatctaaggtcgaaatcaagactgcgtggttctcatacatag

SEQ ID NO: 10186 - DNA, 1701 bp, Artificial Sequence
  Description of Artificial Sequence: Synthetic polynucleotide
atgatgagtcccgcccaagataaattacagcaccagcatcataatcctaattcttcctcttcttcttcctctaagatgacgaacgtttatcaggttaccacgccaaagtctcctcaggatttggaaaacaacatggatgagcccttcaaaatggacaccgccaccagtaatccggacaaggatagcgaaaatacccagcgtttgaagtacgaatgtgccaaaggggaaatacagaatgttttgaacttacatataatgttgaaccacaagcatgttaggcacttaagaagaaatgttcaaaaggttaacgcaaaattggctctcttggaaaccttacataaggatactggtttattgaacaaaatcgaaagaacgtatcaactcaaaataaaacaacatcagcagcatagcgtgctcggcggccactttcacgacagtacggctacggaaaatacgaacgcatctaattataacttatcttacccggttttaagtgattataacatcaactgtcagcctttgtcttctagcagcaacagaaatttatctacaacacgcataccacaccaccattatcatactagaagcaagagtaacgggcttttgttggaaccttctgccctccgtccggcaaatagtaatataattgattacaggttgacaggttctaaatctttatctgaagccataaccaagcccactcccgtctcccttcctcactctaattctgatggcatttcttctcctcgttcctcctctatctcccccttagacgagcagccggggttccagatactcccttttaaaccaagtcagatgcatcttaaccacagacgtaattacagtagcacttgtttgacgagcaatagcggtatcatcggtaagactgaaaataatgagcccatttttagaagatatgacggcattttggttataattacgtgctccaaatgtgaccgttccggtttcacttccgcgcaaggtatcgtgaaccatactagattgaaacattctaaactttattctagccaaccattggcagttttaaacaaccaaaaattacttcctaatgataagcaggatccggaaattttatctaagttcaagaaattgaatttggacccaaacaaagactacttgccctctgacattgcaatcccaaaaccacaatctccaatcaaccactccgagaaccatacgagggctccaaagactgtcaagaacactcctcatttagaaaaactttaccaaaataaagaagacttcaaaaaattgattgacatggttaatgaaactccggatgatttgaatgaatatttgaagcaacgtgaaattcaattaagatatcaaaaggagcaagaagaggaatcttccaaatctgatgacgaagcttcttacgtcccatctccgtctctctctgcaacggctacaacaacaacgactacggacccaccctctccgccagtgttatcctcctccttacaaagaaaattgttacgtaagagaaaattaagcttgaatagctctactcccatggaagatttacctttaagagaaaggttgagagcaaatcccactgacaagaaaccaagaaaagcggcccttttgactaatgaacttgagggtcctgatcctgcagcaaaatcttcttcttattacaatttaaggtccaaatctagattacgtggttctcatacatga

SEQ ID NO: 10187 - DNA, 1344 bp, Saccharomyces cerevisiae
atgacttcagtatcgccctcgccacctgccagtcgatcgggctcaatgtgctccgacttaccgtcctctttgcagactgagaaactggcacatattataggtcttgatgccgacgatgaagttctccggcgcgtaaccaagcagttgagcagatctaggagaattgcttgtctgactggggcaggcatttcgtgcaacgcgggcattcctgactttcgctcttctgatgggctctacgacctagtgaaaaaggattgttcacagtattggtctatcaagtccggcagggaaatgtttgatatttcgctatttagagatgacttcaaaatatccatttttgctaaatttatggagaggctctattcaaatgttcaattggcaaagccgactaagacgcacaagttcattgcgcatctaaaagataggaacaaactgctgcgctgttacacgcaaaacatcgatgggctcgaagaaagcataggacttactttatcaaataggaaattaccgcttacctcatttagttcacattggaaaaatctggatgtcgttcagttgcacggcgacctgaaaactctttcgtgtacaaagtgcttccagacttttccctggagcaggtactggtctcgttgtctaagaagaggtgagttaccattgtgtccggattgcgaagcacttatcaacaagagattgaatgaaggaaagcgaactcttggttctaatgtgggtattctaagacctaatatcgtcctgtatggtgaaaaccatccatcctgtgaaattattacgcaaggcctaaatcttgacataattaaaggcaatcctgattttttgatcatcatgggtacaagtttgaaagttgatggtgtgaaacaactggtaaaaaaattaagtaagaaaattcacgatcgtggcggcctgatcattctcgtaaacaagacacccattggcgaatcctcttggcacggcattatagactaccaaatccactcagattgtgataattgggtcacatttcttgaatcccaaataccagatttcttcaagacgcaagatcaaattaagaagttaagacagttaaaaagggaggcgagcgacttgagaaagcaaatgaaggcccaaaaagactcaatcggaacccccccaacaacccctctacgaactgcccaggggattgatattcaaggaaacaacgaattgaatacaaaaataaagtcgttaaacacagttaagagaaaaatactgtcaccagaaaactccagtgaggaagacgaagaggaaaacttggatacaagaaaacgcgctaagatacgaccaactttcggtgacaaccaagcctcataa

SEQ ID NO: 10188 - DNA, 1344 bp, Artificial Sequence
  Description of Artificial Sequence: Synthetic polynucleotide
atgacttctgtatctccctctccacctgccagtaggagtggctctatgtgctccgacttaccgtcctctttgcagactgagaaattggcacatattataggtcttgatgccgacgatgaagttctccgtcgcgtaaccaagcagttgagcagatctaggagaattgcttgtttaactggggcaggcatttcttgcaacgcgggcattcctgactttcgctcttctgatgggctctacgacttggtgaaaaaggattgttctcagtattggtctatcaagtccggcagggaaatgtttgatatttctttatttagagatgacttcaaaatatccatttttgctaaatttatggagaggctctattctaatgttcaattggcaaagccgactaagacgcacaagttcattgcgcatttgaaagataggaacaaattacttcgctgttacacgcaaaacatcgatgggctcgaagaaagcataggacttactttatccaataggaaattaccgcttacctcttttagttctcattggaaaaatttggatgtcgttcagttgcacggcgacttgaaaactctttcctgtacaaagtgcttccagacttttccctggagcaggtactggtctcgttgtttgagaagaggtgagttaccattgtgtccggattgcgaagcacttatcaacaagagattgaatgaaggaaagagaactcttggttctaatgtgggtattttaagacctaatatcgtcctttatggtgaaaaccatccatcctgtgaaattattacgcaaggcttgaatcttgacataattaaaggcaatcctgattttttgatcatcatgggtacaagtttgaaagttgatggtgtgaaacaattggtaaaaaaattaagtaagaaaattcacgatcgtggcggcttaatcattctcgtaaacaagacacccattggcgaatcctcttggcacggcattatagactaccaaatccacagtgattgtgataattgggtcacatttcttgaatcccaaataccagatttcttcaagacgcaagatcaaattaagaagttaagacagttaaaaagggaggcgagcgacttgagaaagcaaatgaaggcccaaaaagactctatcggaacccccccaacaacccctttgagaactgcccaggggattgatattcaaggaaacaacgaattgaatacaaaaataaagtctttaaacacagttaagagaaaaatattatctccagaaaactccagtgaggaagacgaagaggaaaacttggatacaagaaaacgcgctaagataaggccaactttcggtgacaaccaagcctcttga

SEQ ID NO: 10189 - DNA, 1026 bp, Saccharomyces cerevisiae
atgcagatagtacaaattgagcaggccccaaaagactacataagcgacatcaaaataatcccttccaagtcactgcttttgattacgtcttgggatggctctttaacagtctacaaattcgacattcaagcaaagaatgttgaccttttacaatcgctacgatataaacatccgttattgtgctgcaatttcatcgacaataccgatctgcaaatatacgtgggaactgtacagggtgaaattctaaaagttgatttgataggtagtcccagcttccaagctttgacgaacaatgaagccaatttgggtatttgccgaatatgcaaatatggagacgataaactcattgccgcgtcatgggatggcctgatagaggttatcgaccctcgcaattatggtgatggagttattgctgttaaaaatttgaactctaataacacaaaggtgaagaataagatatttactatggatacaaactcctctcgattgatcgttggtatgaacaatagtcaggttcaatggtttcgcctgccactctgtgaggatgataacggaacaattgaagaatcaggactgaagtaccaaataagagatgtcgctcttttaccgaaagaacaagaaggttatgcatgtagcagcattgacgggcgagttgctgtggagtttttcgatgatcagggcgatgattacaactcaagcaaaagatttgcatttagatgccaccgtttgaatttaaaagatacaaacttagcgtatccagtaaattctattgaattttccccccgtcataagttcctatacacggctggctctgatggcataatttcatgctggaacctacaaacccgcaagaaaataaaaaatttcgccaaatttaacgaagacagcgtggttaaaattgcttgttcggacaatattctatgtctggcaacttctgatgatactttcaagacaaacgccgcaattgaccaaactattgaactaaacgcaagttcaatatacataatatttgactatgagaactga

SEQ ID NO: 10190 - DNA, 1026 bp, Artificial Sequence
  Description of Artificial Sequence: Synthetic polynucleotide
atgcagatagtacaaattgagcaggccccaaaagactacataagcgacatcaaaataatcccttccaagtctttacttttgattacgtcttgggatggctctttaacagtctacaaattcgacattcaagcaaagaatgttgaccttttacaatctttaagatataaacatccgttattgtgctgcaatttcatcgacaataccgatttgcaaatatacgtgggaactgtacagggtgaaattttgaaagttgatttgataggtagtcccagcttccaagctttgacgaacaatgaagccaatttgggtatttgcagaatatgcaaatatggagacgataaactcattgccgcgtcttgggatggcttgatagaggttatcgaccctcgcaattatggtgatggagttattgctgttaaaaatttgaactctaataacacaaaggtgaagaataagatatttactatggatacaaactcctctagattgatcgttggtatgaacaatagtcaggttcaatggtttcgcttgccactctgtgaggatgataacggaacaattgaagaatctggattgaagtaccaaataagagatgtcgctcttttaccgaaagaacaagaaggttatgcatgtagcagcattgacgggagagttgctgtggagtttttcgatgatcagggcgatgattacaactccagcaaaagatttgcatttagatgccaccgtttgaatttaaaagatacaaacttagcgtatccagtaaattctattgaattttccccccgtcataagttcttgtacacggctggctctgatggcataatttcttgctggaacttacaaacccgcaagaaaataaaaaatttcgccaaatttaacgaagacagcgtggttaaaattgcttgttctgacaatattctttgtttggcaacttctgatgatactttcaagacaaacgccgcaattgaccaaactattgaattgaacgcaagtagtatatacataatatttgactatgagaactga

SEQ ID NO: 10191 - DNA, 1770 bp, Saccharomyces cerevisiae
atgtcattgacagccgatgaatacaaacaacaaggtaacgctgcatttaccgctaaggattacgataaagcgatagagctcttcactaaagctattgaagtttctgaaactccaaaccatgttttatattctaacaggtccgcctgttatacttctttaaagaaatttagtgacgcattgaatgatgctaatgaatgtgtcaaaatcaatccatcttggtctaagggttataatagactcggtgccgcccacttaggtcttggcgatctcgacgaagctgaaagcaactacaaaaaagccttggagttggatgccagtaacaaggccgccaaagaaggattggatcaggttcatcgtacccaacaggcaagacaggcacagcctgatttagggttgacacagttgtttgctgacccaaatttaattgaaaatttaaagaagaacccaaaaactagcgaaatgatgaaggaccctcaattagtggctaaactgattgggtacaaacaaaatccgcaagctattggccaagatctgtttactgatccaagattaatgaccatcatggctacattgatgggggttgatttaaacatggatgatataaaccaatcaaactccatgccaaaggaaccggaaaccagtaaaagcactgaacaaaagaaagatgctgaaccacaaagcgattccactacgagcaaggaaaattcctctaaagcaccacagaaagaagaaagtaaggaatccgagccaatggaagttgatgaagatgactctaaaattgaggccgacaaggaaaaggccgaaggtaacaagttttacaaggcacgtcaattcgatgaagctatagagcactacaacaaggcgtgggaactgcataaagatattacctatttaaacaaccgtgctgctgctgaatacgaaaaaggcgaatacgagacagctatttctaccttgaatgatgctgttgagcaaggtagagaaatgagagcggattacaaggtcatttccaaatcatttgcgcgtattggtaatgcctatcacaaattgggtgacttgaagaaaactatagaatactaccaaaaatcattgaccgaacatcgtactgctgacattttgaccaagttaaggaatgctgaaaaagaattgaagaaagctgaggcggaggcgtatgttaaccctgaaaaggcggaggaagcccgtcttgaaggtaaggaatattttaccaagagtgattggccgaatgctgttaaggcttacactgaaatgatcaaaagggcacctgaagatgctagaggatattctaatagagctgctgcactagcgaagttaatgtctttccctgaagctatcgcagattgtaacaaagccattgaaaaagatccaaatttcgtgagagcttatatcagaaaggccaccgcacaaattgctgttaaagaatatgcttccgctttggaaacactagatgcggccagaaccaaagatgctgaagtgaataatggttctagtgcaagggaaattgatcaactgtactacaaggcaagccaacaaagattccaacctggtaccagtaacgaaaccccagaagaaacctatcaaagggccatgaaagatcctgaagtggctgcgatcatgcaagatcctgttatgcaaagtattttgcagcaggcccaacagaatcccgctgctttacaagaacacatgaaaaatccagaagtattcaaaaagattcagacgttgatcgctgctggtatcatccggactggccgctaa

SEQ ID NO: 10192 - DNA, 1770 bp, Artificial Sequence
  Description of Artificial Sequence: Synthetic polynucleotide
atgtctttgacagccgatgaatacaaacaacaaggtaacgctgcatttaccgctaaggattacgataaagcgatagagctcttcactaaagctattgaagtttctgaaactccaaaccatgttttatattctaacaggtccgcctgttatacttctttaaagaaatttagtgacgcattgaatgatgctaatgaatgtgtcaaaatcaatccatcttggtctaagggttataatagactcggtgccgcccacttaggtcttggcgatctcgacgaagctgaaagcaactacaaaaaagccttggagttggatgccagtaacaaggccgccaaagaaggattggatcaggttcatcgtacccaacaggcaagacaggcacagcctgatttagggttgacacagttgtttgctgacccaaatttaattgaaaatttaaagaagaacccaaaaactagcgaaatgatgaaggaccctcaattagtggctaaattgattgggtacaaacaaaatccgcaagctattggccaagatttatttactgatccaagattaatgaccatcatggctacattgatgggggttgatttaaacatggatgatataaaccaaagtaactccatgccaaaggaaccggaaaccagtaaaagcactgaacaaaagaaagatgctgaaccacaaagcgattccactacgagcaaggaaaattcctctaaagcaccacagaaagaagaaagtaaggaatccgagccaatggaagttgatgaagatgactctaaaattgaggccgacaaggaaaaggccgaaggtaacaagttttacaaggcacgtcaattcgatgaagctatagagcactacaacaaggcgtgggaattacataaagatattacctatttaaacaaccgtgctgctgctgaatacgaaaaaggcgaatacgagacagctatttctaccttgaatgatgctgttgagcaaggtagagaaatgagagcggattacaaggtcatttccaaaagttttgcgcgtattggtaatgcctatcacaaattgggtgacttgaagaaaactatagaatactaccaaaaatctttgaccgaacatcgtactgctgacattttgaccaagttaaggaatgctgaaaaagaattgaagaaagctgaggcggaggcgtatgttaaccctgaaaaggcggaggaagcccgtcttgaaggtaaggaatattttaccaagagtgattggccgaatgctgttaaggcttacactgaaatgatcaaaagggcacctgaagatgctagaggatattctaatagagctgctgcattagcgaagttaatgtctttccctgaagctatcgcagattgtaacaaagccattgaaaaagatccaaatttcgtgagagcttatatcagaaaggccaccgcacaaattgctgttaaagaatatgcttccgctttggaaacattagatgcggccagaaccaaagatgctgaagtgaataatggttctagtgcaagggaaattgatcaattgtactacaaggcaagccaacaaagattccaacctggtaccagtaacgaaaccccagaagaaacctatcaaagggccatgaaagatcctgaagtggctgcgatcatgcaagatcctgttatgcaaagtattttgcagcaggcccaacagaatcccgctgctttacaagaacacatgaaaaatccagaagtattcaaaaagattcagacgttgatcgctgctggtatcatcagaactggccgctga

SEQ ID NO: 10193 - DNA, 888 bp, Saccharomyces cerevisiae
atgttaatgcaaataaaaatggacaatcatccttttaattttcaacctattttagcttcccattcaatgacaagagacagtacaaagccaaaaaaaatgacggataccgctttcgtgccaagccctcctgtagggtttattaaagaggagaacaaggctgatttgcatacaatttcggtagttgcttcgaatgtgactctaccgcaaattcagctcccaaagattgcaacacttgaagagcctggttatgagagcagaactggctcacttacagatctttctggaagaagaaattctgttaatataggagcattgtgtgaggatgttccaaatactgcgggcccacatattgcaaggccggtgacaataaacaatttgattcctccgtctttaccaagactgaacacataccagcttagaccgcaactatcagatactcatttaaactgtcacttcaattctaatccatacaccactgcatcacacgcaccatttgaatcttcctacactactgcatctacatttactagccaaccggcagcttcatattttccctcaaatagtaccccagctacgagaaaaaatagtgccacgactaaccttccttcagaggaaagacgtcgagtttccgtttctctttcagagcaggtttttaacgaaggcgaaagatataacaatgatggccagttgatcggtaaaacaggcaaacctttaagaaatactaagagagctgcccaaaatcgaagcgcacaaaaggcgtttaggcagcgtcgtgagaaatacatcaaaaatctcgaagaaaaatcaaaactattcgatggcttgatgaaagaaaacagtgaattgaaaaaaatgattgaatcattaaagtcgaaattaaaagaataa

SEQ ID NO: 10194 - DNA, 888 bp, Artificial Sequence
  Description of Artificial Sequence: Synthetic polynucleotide
atgttaatgcaaataaaaatggacaatcatccttttaattttcaacctattttagcttcccattctatgacaagagacagtacaaagccaaaaaaaatgacggataccgctttcgtgccaagccctcctgtagggtttattaaagaggagaacaaggctgatttgcatacaattagtgtagttgcttctaatgtgactttaccgcaaattcagctcccaaagattgcaacacttgaagagcctggttatgagagcagaactggctctcttacagatctttctggaagaagaaattctgttaatataggagcattgtgtgaggatgttccaaatactgcgggcccacatattgcaaggccggtgacaataaacaatttgattcctccgtctttaccaagattgaacacataccagcttagaccgcaattaagtgatactcatttaaactgtcacttcaattctaatccatacaccactgcatctcacgcaccatttgaatcttcctacactactgcatctacatttactagccaaccggcagcttcttattttccctccaatagtaccccagctacgagaaaaaatagtgccacgactaaccttccttctgaggaaagacgtcgtgtttccgtttctctttctgagcaggtttttaacgaaggcgaaagatataacaatgatggccagttgatcggtaaaacaggcaaacctttaagaaatactaagagagctgcccaaaatagaagcgcacaaaaggcgtttaggcagcgtcgtgagaaatacatcaaaaatctcgaagaaaaatctaaattattcgatggcttgatgaaagaaaacagtgaattgaaaaaaatgattgaatctttaaagagtaaattaaaagaatga

SEQ ID NO: 10195 - DNA, 336 bp, Saccharomyces cerevisiae
atgatgcagacatcaactagttctcgagtgaggaggtatccttatcaaatcactctctccctagtattgaaagggttttactcgccttctgctcctagttacgatttttgcctagtactccttcctaccctcttcctcatagatttaatgccaataaaattttctttgcatgtcaccattgggatcggtgaggcaactccggttccgattttttttttttcagcgccgtggtatttccgctcgggaaatcccctcccgcattgcgtcagagcttatcgatgtaaagttaatttccctttttttcggttgggctggagcacttggttgcattactaa

SEQ ID NO: 10196 - DNA, 336 bp, Artificial Sequence
  Description of Artificial Sequence: Synthetic polynucleotide
atgatgcagacatctactagttctcgtgtgaggaggtatccttatcaaatcactctctccttagtattgaaagggttttactctccttctgctcctagttacgatttttgcttagtactccttcctaccctcttcctcatagatttaatgccaataaaattttctttgcatgtcaccattgggatcggtgaggcaactccggttccgattttttttttttctgcgccgtggtatttccgctctggaaatcccctcccgcattgcgtcagagcttatagatgtaaagttaatttccctttttttagattgggctggagcacttggttgcattactga

SEQ ID NO: 10197 - DNA, 1860 bp, Saccharomyces cerevisiae
atgatcataagattgcatttttactacctcctcactttagtttaccatttaggacttgtaggtgcgtatgaaaaagcagcaagaaagagaattcaacctcccgatttgatacctggtcctccgggacataaacttggtgatgaaagaccaccgcattacgaccaccggccaccttataaaaaacacatcgacaacattccagcttacaatctgactgatttgatagatgataaactactaaataaatatgaaaactcatgcacggtaaatgtattgacaggtggcttcatctctctagcaagtaattcgtggcacttacgtgcttataattacactttaaattacccatcctttttgatccgatgcgataatggcagtgcaaatcctaatttctctcatgtcttacaagactttgtttatgacatcaacaacaaattcaacgttcaagatgacagtagtaaatacatcggaaaagacccatttcccttaggaatgataatgatcacctttgcttctgggtgtatctgtgtggcaacatggatgctatttttggttgtcttattactgccatccgataatcataatagaagaaataaagttgtacatgtttacgtccttttctctgcgattataagaactgtatttctaaacgagactatagccgtcatatttgacagccaatatcacgatgactaccaggatgcgagccaatttgaatcgttcatcgtagaaactgcaccatataaaatatgtgaattagttgcaaatattttgagtgatataaactggatttatattgttcactacttacagtccaattatggaaaaccaacttggaattggatcccatttaaaatgaaaaaggggacacatatcataattaccgtgggttgcttcctctcactagccgataacattttattcgcaaaccttctttggagaaagaaccttgtagttttgaaggtattttacaagctaatcgaattactgatttacacaattttcatctccattatttgttacttcacatggcataattttgcttacatacttttaccgaaaactgctgaaattaatacggacggtaagtgtaaaacgaaattgagaattctttgggaaaattatcacgaaactataccattattggcgtataatattcttatatttattttattctatttcaccacaatttttttcgctgctttcaccaaacatgttagaggttggacatttaactttgttcatcttttgaaagttttaataacagtgaacgtttggggcttaattggagtattggaaaagagggagctgcacataagcaaaaaaacagtccttggacgaaaaattaacaatagggacaaatttttcgccaatccaacagtcaattattacggagaagatttaggcaagcatttaagcgccataacgttaaacagggatttaaacactactaaaagtaacactacttcccacgattcatcaagtttagtaggatccccttcacccacctggaaatctccaatcgaaagaataagggacagaagaagaagacataagataatgaaaagtgagaataaatttgggcaaaatcccagttttggaagtaaatcgaatggcaaacctaatactaaaacgacattatccaaatatcgacagctattaaggaagcctaggcgaaaaaccaattcatatgaaccaaaaaatggcattggacagaataaagaaggctcaactgttagaccaggagccgacaaacatattagagattccaattatctagctacagacatcagtgacaacgaaagtatggaaaccgaacttcgaaccaaccacatttataattacgaaaatagtgattaa

SEQ ID NO: 10198 - DNA, 1860 bp, Artificial Sequence
  Description of Artificial Sequence: Synthetic polynucleotide
atgatcataagattgcatttttactacctcctcactttagtttaccatttaggacttgtaggtgcgtatgaaaaagcagcaagaaagagaattcaacctcccgatttgatacctggtcctccgggacataaacttggtgatgaaagaccaccgcattacgaccacagaccaccttataaaaaacacatcgacaacattccagcttacaatttaactgatttgatagatgataaattattgaataaatatgaaaactcttgcacggtaaatgtattgacaggtggcttcatctctttggcaagtaattcttggcacttacgtgcttataattacactttaaattacccatcctttttgatccgttgcgataatggcagtgcaaatcctaatttctctcatgtcttacaagactttgtttatgacatcaacaacaaattcaacgttcaagatgacagtagtaaatacatcggaaaagacccatttcccttaggaatgataatgatcacctttgcttctgggtgtatctgtgtggcaacatggatgttatttttggttgtcttattattaccatccgataatcataatagaagaaataaagttgtacatgtttacgtccttttctctgcgattataagaactgtatttttgaacgagactatagccgtcatatttgacagccaatatcacgatgactaccaggatgcgagccaatttgaatctttcatcgtagaaactgcaccatataaaatatgtgaattagttgcaaatattttgagtgatataaactggatttatattgttcactacttacagtccaattatggaaaaccaacttggaattggatcccatttaaaatgaaaaaggggacacatatcataattaccgtgggttgcttcctctccttggccgataacattttattcgcaaaccttctttggagaaagaaccttgtagttttgaaggtattttacaagttaatcgaattattgatttacacaattttcatctccattatttgttacttcacatggcataattttgcttacatacttttaccgaaaactgctgaaattaatacggacggtaagtgtaaaacgaaattgagaattctttgggaaaattatcacgaaactataccattattggcgtataatattcttatatttattttattctatttcaccacaatttttttcgctgctttcaccaaacatgttagaggttggacatttaactttgttcatcttttgaaagttttaataacagtgaacgtttggggcttaattggagtattggaaaagagggagttgcacataagcaaaaaaacagtccttggaagaaaaattaacaatagggacaaatttttcgccaatccaacagtcaattattacggagaagatttaggcaagcatttaagcgccataacgttaaacagggatttaaacactactaaaagtaacactacttcccacgattcttccagtttagtaggatccccttctcccacctggaaatctccaatcgaaagaataagggacagaagaagaagacataagataatgaaaagtgagaataaatttgggcaaaatcccagttttggaagtaaatctaatggcaaacctaatactaaaacgacattatccaaatataggcagcttttaaggaagcctaggagaaaaaccaattcttatgaaccaaaaaatggcattggacagaataaagaaggctccactgttagaccaggagccgacaaacatattagagattccaattatttggctacagacatcagtgacaacgaaagtatggaaaccgaacttagaaccaaccacatttataattacgaaaatagtgattga

SEQ ID NO: 10199 - DNA, 1305 bp, Saccharomyces cerevisiae
atgccaaattttcaaaaacctttttctggttcttcggatggcaattctgtaatgaacgacctaggtaataaagtcgccatcaaggtttttgattgtagaagtgctcaagatggcagcgaagagcagaatgtaaatgtaaccacgaaccaaatgtatttaatgtttcaaagtaacaattacaacgtgccgccaccaaattacaataccgaggatttgggttctcaaggacctccgacgcatgcttattacgctccatttcagcatcccatccatcttcaacctcccgtgcctcctgtatataagaacaacacatattctgccacagaccagtatagtgactcctcgtttcctaatacttcaggccacactccagtaattgatagtaattactataatgatgctctggcttctatacctacaacaacgacgggtagtactacaatgactacagacaatggcaatactattgacagcgaagaatacattgataacatggaagtctttagtagcgaggaaaatgaaaacattgataatgtaaagcaaaccgatcttaaatctgaaaaggactcgagtcttctttcagcagcttcaatcgtgaaaaaggaacaattgtctggctttgaaaattttttgcctttatcgaagacagagtctcccttagttactgcagacgagattaaatcatctttgaatttggagaatattgacaatgctgacagtatgagcttcaagttaaaaacttcacctatacggaaacattttcatgttaaacccaaaagaataacaagggtgaggacaggaagggtatcacacaatataattgaaaagaaataccgttccaatattaatgataaaattgaacaattaaggagaactgtcccaacgctacgagtagcgtataaaaaatgtaacgatcttcccattacatctagagacctagcagacttagatggcctagagccagcaacaaaattgaataaggcgtccattttaacgaaatctattgaatatatttgtcatttagaaagaaagtgcctacagctaagcttggctaatcaacatttatcaaatgacacacgggattctttcgtccatcttaccgagccatctcaaccgttgagtgacaacagtagtagtgaacaagtacaaaagcaaaccagaagctgccaacgccaacggcagcggcagccacgacaacaacaaccattgcataacattcaatataatattccacatcaaaacggcctcatgagcggcaccaacaattcacatgatatggattttaacaacgcaggagacttttaa

SEQ ID NO: 10200 - DNA, 1305 bp, Artificial Sequence
  Description of Artificial Sequence: Synthetic polynucleotide
atgccaaattttcaaaaacctttttctggttcttctgatggcaattctgtaatgaacgacttgggtaataaagtcgccatcaaggtttttgattgtagaagtgctcaagatggcagcgaagagcagaatgtaaatgtaaccacgaaccaaatgtatttaatgtttcaaagtaacaattacaacgtgccgccaccaaattacaataccgaggatttgggttctcaaggacctccgacgcatgcttattacgctccatttcagcatcccatccatcttcaacctcccgtgcctcctgtatataagaacaacacatattctgccacagaccagtatagtgactcctcttttcctaatacttctggccacactccagtaattgatagtaattactataatgatgctttggcttctatacctacaacaacgacgggtagtactacaatgactacagacaatggcaatactattgacagcgaagaatacattgataacatggaagtctttagtagcgaggaaaatgaaaacattgataatgtaaagcaaaccgatcttaaatctgaaaaggacagcagtcttctttctgcagcttctatcgtgaaaaaggaacaattgtctggctttgaaaattttttgcctttatccaagacagagtctcccttagttactgcagacgagattaaatcttctttgaatttggagaatattgacaatgctgacagtatgagcttcaagttaaaaacttctcctataagaaaacattttcatgttaaacccaaaagaataacaagggtgaggacaggaagggtaagccacaatataattgaaaagaaataccgttccaatattaatgataaaattgaacaattaaggagaactgtcccaacgcttcgtgtagcgtataaaaaatgtaacgatcttcccattacatctagagacttggcagacttagatggcttagagccagcaacaaaattgaataaggcgtccattttaacgaaatctattgaatatatttgtcatttagaaagaaagtgcttacagttgagcttggctaatcaacatttatccaatgacacaagagattctttcgtccatcttaccgagccatctcaaccgttgagtgacaacagtagtagtgaacaagtacaaaagcaaaccagaagctgccaacgccaaagacagagacagccaagacaacaacaaccattgcataacattcaatataatattccacatcaaaacggcctcatgagcggcaccaacaattctcatgatatggattttaacaacgcaggagacttttga

SEQ ID NO: 10201 - DNA, 201 bp, Saccharomyces cerevisiae
atgcggcgtgcattgttcatagcggggcaaacatacttgtggcttaatttgacacatctacttttaatcttttcttggtctagtacaatggctttttcccaaagtagaaggcttcttactccaaccgtaccctgtcctactttactgggcattgattttttaattcttgtcttgaggcatttcgacgagattttcatttga

SEQ ID NO: 10202 - DNA, 201 bp, Artificial Sequence
  Description of Artificial Sequence: Synthetic polynucleotide
atgagacgtgcattgttcatagcggggcaaacatacttgtggcttaatttgacacatttgcttttaatcttttcttggtctagtacaatggctttttcccaaagtagaaggcttcttactccaaccgtaccctgtcctactttattaggcattgattttttaattcttgtcttgaggcatttcgacgagattttcatttga

SEQ ID NO: 10203 - DNA, 2109 bp, Saccharomyces cerevisiae
atgggtatccaaggtcttcttcctcagttaaagcccatacagaatccagtatcactacgtaggtatgaaggagaagtgttagccattgatggctatgcatggctacatagagcagcctgctcttgtgcttatgaacttgcaatgggaaaaccaactgataagtacctgcagtttttcataaaaagatttagtttattgaaaacctttaaagttgaaccgtatttggtcttcgatggtgatgccattccagttaaaaagtctactgaatctaaaagaagggataagagaaaagaaaacaaagccatagctgaaagactgtgggcctgtggcgaaaagaaaaatgctatggactattttcaaaaatgtgtcgacataacgcctgaaatggcaaaatgtatcatatgctactgtaagctaaacggtattcggtacatagtggctccgtttgaggctgactctcaaatggtatatttagaacagaaaaacattgtgcaaggaataatatccgaagattctgacctcctcgtcttcggatgtcgacgtctcattacgaagctgaatgattatggagaatgtttagaaatatgtcgcgataattttattaaactgcctaaaaagtttccgttgggatccttaactaatgaagaaatcataacaatggtttgtttatccggttgtgactatacaaatggaattcccaaggttggcctgattaccgcaatgaaattagttagaagattcaatactattgaaaggataattctgagtatacagcgggagggaaaactgatgataccagacacatacattaatgaatatgaagctgcagttttagcatttcaattccaaagggtattttgccctattcggaagaaaatagtgagcttgaatgaaattccgctgtacttgaaagataccgaaagtaaaagaaaaagactctacgcgtgcattggttttgtcatacacagagaaactcagaaaaagcaaattgttcatttcgacgacgatatagatcaccacttgcatttaaaaattgctcaaggtgacttgaatccatatgattttcaccaacctctagccaacagagagcacaaattacagctggcatccaagtcaaatatagagttcgggaaaactaatactactaattctgaagccaaagtcaaaccaatagaatcgttcttccaaaaaatgacaaaattggatcataacccaaaagttgcaaataacatccatagtctaagacaagcggaagacaaactgacaatggcaattaagcgtaggaaattaagtaatgccaatgtagtccaagaaacgttgaaggatacaagaagcaaattttttaataaaccctccatgactgttgtggaaaacttcaaagaaaaaggcgacagcatacaggattttaaagaggacacaaactcacaatctttggaagagcctgtttccgagtctcaactatctacacaaatacctagttcttttattacaaccaatttagaggatgacgacaacctgagtgaagaggtttctgaagttgtcagtgacattgaagaggaccgaaagaattctgaaggaaagactatcggtaacgaaatctataatacagatgatgacggtgatggcgatactagcgaggattatagcgaaactgcggaatcaagagttcccacgagcagcaccacctcatttcccgggtcatcccagaggagtatatcggggtgcacaaaagttttacaaaagtttagatattcatcttcattcagcggagttaatgcaaatagacaaccactatttcctcggcacgttaatcaaaaaagtagaggaatggtatacgtcaatcaaaatagagatgatgattgcgacgataacgatggtaaaaatcaaatcacgcaaaggccatcactgcgaaaaagccttattggtgccaggtcacagagaattgtgattgacatgaaaagcgtagatgaacgaaaatcattcaattcatcaccaattttgcatgaggaaagtaagaaaagggacatcgaaactactaagtcaagccaagctcggccggcagtcagatctatctccttgctttcccaatttgtttataaaggtaaataa

SEQ ID NO: 10204 - DNA, 2109 bp, Artificial Sequence
  Description of Artificial Sequence: Synthetic polynucleotide
atgggtatccaaggtcttcttcctcagttaaagcccatacagaatccagtatctttacgtaggtatgaaggagaagtgttagccattgatggctatgcatggttacatagagcagcctgctcttgtgcttatgaacttgcaatgggaaaaccaactgataagtacttacagtttttcataaaaagatttagtttattgaaaacctttaaagttgaaccgtatttggtcttcgatggtgatgccattccagttaaaaagtctactgaatctaaaagaagggataagagaaaagaaaacaaagccatagctgaaagattatgggcctgtggcgaaaagaaaaatgctatggactattttcaaaaatgtgtcgacataacgcctgaaatggcaaaatgtatcatatgctactgtaagttgaacggtattagatacatagtggctccgtttgaggctgactctcaaatggtatatttagaacagaaaaacattgtgcaaggaataatatccgaagattctgacctcctcgtcttcggatgtcgtcgtctcattacgaagttgaatgattatggagaatgtttagaaatatgtcgcgataattttattaaattacctaaaaagtttccgttgggatccttaactaatgaagaaatcataacaatggtttgtttatccggttgtgactatacaaatggaattcccaaggttggcttaattaccgcaatgaaattagttagaagattcaatactattgaaaggataattttaagtatacagagagagggaaaattaatgataccagacacatacattaatgaatatgaagctgcagttttagcatttcaattccaaagggtattttgccctattagaaagaaaatagtgagcttgaatgaaattccgttgtacttgaaagataccgaaagtaaaagaaaaagactctacgcgtgcattggttttgtcatacacagagaaactcagaaaaagcaaattgttcatttcgacgacgatatagatcaccacttgcatttaaaaattgctcaaggtgacttgaatccatatgattttcaccaacctttggccaacagagagcacaaattacagttagcatccaagagcaatatagagttcgggaaaactaatactactaattctgaagccaaagtcaaaccaatagaatctttcttccaaaaaatgacaaaattggatcataacccaaaagttgcaaataacatccatagtttgagacaagcggaagacaaattaacaatggcaattaagcgtaggaaattaagtaatgccaatgtagtccaagaaacgttgaaggatacaagaagcaaattttttaataaaccctccatgactgttgtggaaaacttcaaagaaaaaggcgacagcatacaggattttaaagaggacacaaactctcaatctttggaagagcctgtttccgagtctcaattatctacacaaatacctagttcttttattacaaccaatttagaggatgacgacaacttgagtgaagaggtttctgaagttgtcagtgacattgaagaggacagaaagaattctgaaggaaagactatcggtaacgaaatctataatacagatgatgacggtgatggcgatactagcgaggattatagcgaaactgcggaatctagagttcccacgagcagcaccacctcttttcccgggtcttcccagaggagtataagcgggtgcacaaaagttttacaaaagtttagatattcttcttctttcagcggagttaatgcaaatagacaaccattatttcctcgtcacgttaatcaaaaaagtagaggaatggtatacgtcaatcaaaatagagatgatgattgcgacgataacgatggtaaaaatcaaatcacgcaaaggccatctttaagaaaaagccttattggtgccaggagccagagaattgtgattgacatgaaaagcgtagatgaaagaaaatctttcaattcttctccaattttgcatgaggaaagtaagaaaagggacatcgaaactactaagagcagccaagctaggccggcagtcagatctatctccttgctttcccaatttgtttataaaggtaaatga

SEQ ID NO: 10205 - DNA, 2250 bp, Saccharomyces cerevisiae
atgaccagtatgtcaattattgatgatgagaacgtgaaaaaaacttctaatggggcagctgttgtcactgatgtggctcaacacgctgtaagtgattcggacaataacaaagcgcaacttctaggcgatggatccaacactgaatatgtggttgatattttcattgaagccgctaaggatggggatttaaaagtggtgaaggacgtggtcgaaagtggagcagtggatattaataacgaccgcattgatgaattatccggcttacactgggcctgtataaacaataggttttctgtagcaaagttcctattacttaggggagcaaatcctaaccaggcggcaggccccggaggggctactgctttgcactgggccgcaaggtacggtaatatctacattgttgacctgcttctcaaacatggcgctgatccgacgctcaaagatgagcagggtcttaacatcatgcattttagcgtttacagttctaacattttacttgttgtttatgttctttattttgtcgtaaacaacaatgacaacgtcgatatcgattcaaaagataacaataacagaacacccctactttgggctgcttatcaaggagattttctcactgtagaacttttattgaaatttggctccacagttgcatggacggacaacagagggttcaatgctctccattgtgctctagttggaggtgatcaaagggtcatatgtgacttaatacttagcggtgcaaatttctacgaaaggaataaccagaagcaagactgttttgatctagccgaaggaatgggaaccaaatcactttttgaacaagcgttgcaacatcatggatatgacaggcttggaaatcagaaagacaaactgttcaagaaaagctcgcatgcacaattcacaatttttttgtcaccatttttactcatggtttacatatacttaatttctctcgttctttctccagtgctagccattatgctttccctactggtcactgttgtcatggtcaacacattaaagaagtttgtattaccatgccttcccagaaaaaacacttacaaagtttctttgactagaactccctttttcagtggcctctttctgtccactttctgttttttaatatatatatggacgaagaaactctatccatatagtgtatctgactataccatgaaaaacgtccagtttttggttacttcctttctcacagttgtactatttctgagattagtacggtcagatcctggttgtctgaaaacggatgatagtttgacttcgatacaagaaacaataaaacaactgattgacttagggaagtttgatagggaaaacttttgtgttgagacattagaaaggaagcctttgaggagtaaatattctttctttagcggcgccctggtggccagatatgaccattattgtccatggatttataatgatgttggcttaaaaaatcacaaactttttgtcttctttgctgtgacggtccaatatcacatgtttttgttcatgtggttatgtctggcatattttaagaaaacgaactatatttacgaacaagttgaagaatatgcaagatgtgccctgctcaagaatgagactttgtgtaagggttctaattacgatccctctaccttttttttattcatttggattagcgtaaacttcatctggctgggggctatgttgattgtccagttcttccagatattaaaaggaatcacgactcctgaattgttcatcttaatcaaggaggagcacaaggcaaaatttatcaatctgatacccttcgaaaactctatatataccagtgaaagtaaaggtgttgaagatagtgatatgattcctgaaggtccaagtgcgaccaccattactcacacaatttctattgatggtttggaaccaagaaataggcgccgcgccattcttagcgcttgcttttcaatgatgggtattaatcaatggctcgttactattaaggaaatagtaggtataacccacattttgcatggacaggttccacaacaacatcacagttcattgcttcgaagtttcttagtgacaaatcactggaagacgaatttgacggatttttggcttaatagtgatgtaacagcgcccttgtggcaacgatttttctattcttcggatacttcaaaagctatgttgggtggaactgaggttgactactacgagctatacgaatatccggcccgagaaggagaagtattacgtccaaactaa

SEQ ID NO: 10206 - DNA, 2250 bp, Artificial Sequence
  Description of Artificial Sequence: Synthetic polynucleotide
atgaccagtatgtctattattgatgatgagaacgtgaaaaaaacttctaatggggcagctgttgtcactgatgtggctcaacacgctgtaagtgattctgacaataacaaagcgcaacttttgggcgatggatccaacactgaatatgtggttgatattttcattgaagccgctaaggatggggatttaaaagtggtgaaggacgtggtcgaaagtggagcagtggatattaataacgaccgcattgatgaattatccggcttacactgggcctgtataaacaataggttttctgtagcaaagttcttattacttaggggagcaaatcctaaccaggcggcaggccccggaggggctactgctttgcactgggccgcaaggtacggtaatatctacattgttgacttacttctcaaacatggcgctgatccgacgctcaaagatgagcagggtcttaacatcatgcattttagcgtttacagttctaacattttacttgttgtttatgttctttattttgtcgtaaacaacaatgacaacgtcgatatcgattctaaagataacaataacagaacacccttgctttgggctgcttatcaaggagattttctcactgtagaacttttattgaaatttggctccacagttgcatggacggacaacagagggttcaatgctctccattgtgctttggttggaggtgatcaaagggtcatatgtgacttaatacttagcggtgcaaatttctacgaaaggaataaccagaagcaagactgttttgatttggccgaaggaatgggaaccaaatctctttttgaacaagcgttgcaacatcatggatatgacaggcttggaaatcagaaagacaaattattcaagaaaagctctcatgcacaattcacaatttttttgtctccatttttactcatggtttacatatacttaatttctctcgttctttctccagtgcttgccattatgctttccttattggtcactgttgtcatggtcaacacattaaagaagtttgtattaccatgccttcccagaaaaaacacttacaaagtttctttgactagaactccctttttcagtggcctctttctttccactttctgttttttaatatatatatggacgaagaaactctatccatatagtgtatctgactataccatgaaaaacgtccagtttttggttacttcctttctcacagttgtattatttttaagattagtaagaagtgatcctggttgtttgaaaacggatgatagtttgacttccatacaagaaacaataaaacaattgattgacttagggaagtttgatagggaaaacttttgtgttgagacattagaaaggaagcctttgaggagtaaatattctttctttagcggcgccttagtggccagatatgaccattattgtccatggatttataatgatgttggcttaaaaaatcacaaactttttgtcttctttgctgtgacggtccaatatcacatgtttttgttcatgtggttatgtttggcatattttaagaaaacgaactatatttacgaacaagttgaagaatatgcaagatgtgccttactcaagaatgagactttgtgtaagggttctaattacgatccctctaccttttttttattcatttggattagcgtaaacttcatctggttaggggctatgttgattgtccagttcttccagatattaaaaggaatcacgactcctgaattgttcatcttaatcaaggaggagcacaaggcaaaatttatcaatttgatacccttcgaaaactctatatataccagtgaaagtaaaggtgttgaagatagtgatatgattcctgaaggtccaagtgcgaccaccattactcacacaatttctattgatggtttggaaccaagaaataggcgccgcgccattcttagcgcttgcttttccatgatgggtattaatcaatggctcgttactattaaggaaatagtaggtataacccacattttgcatggacaggttccacaacaacatcacagttctttgcttaggagtttcttagtgacaaatcactggaagacgaatttgacggatttttggcttaatagtgatgtaacagcgcccttgtggcaaagatttttctattcttctgatacttctaaagctatgttgggtggaactgaggttgactactacgagttatacgaatatccggccagagaaggagaagtattacgtccaaactga

SEQ ID NO: 10207 - DNA, 243 bp, Saccharomyces cerevisiae
atgaacacacaagaactatgtaagattttcgtagccagagaatatcctctggtagtggtgccctttatatattttgttctatttttacaccagaagtatcacactactctaaattatgtctggtaccctacgtgttctaaaagaatctgggtgagagaaaaaggaagaaagtgctcctttttttttttttcaaaggtgcctcggtccgatggcttcgcaaacaatagatgccaaaggaaatga

SEQ ID NO: 10208 - DNA, 243 bp, Artificial Sequence
  Description of Artificial Sequence: Synthetic polynucleotide
atgaacacacaagaattatgtaagattttcgtagccagagaatatcctttggtagtggtgccctttatatattttgttttatttttacaccagaagtatcacactactttgaattatgtctggtaccctacgtgttctaaaagaatctgggtgagagaaaaaggaagaaagtgctcctttttttttttttccaaggtgcctagatccgatggcttcgcaaacaatagatgccaaaggaaatga

SEQ ID NO: 10209 - DNA, 2370 bp, Saccharomyces cerevisiae
atgccactgtgtgagaaagggaatgatccaatcgatagctctactattgatagcctctgcgctgcatttgacaagactttgaaatccacccctgatgtccaaaaatacaatgatgctataaatacaattttccagctaaggcaaaaatctgaatctgggaaaatgccggctgatttaacgaatagtgaagcccttaaagatcgtcagaaaatcgaagaaatattgaccaggtcttaccaagaccattctgagtcccgcgtacatttatctaaacttatacagaatgatattcccttcgcactcaatttatttgaaatattatcaagatcatccatccacgttttcgttggttgcttttccaataaagacgcaacaattgcattgttaaatgagctgcaaattaggatacactatggcgaggacacccacgtcacgtatttactgagcataattctacaactattgaataagttcaagtacaatttcaaggaggtgcgatttttagtgaaggaacttattttgcgcataagcgaagatgaagtaaaatcgatgatgcttataatttttgctgaattacaatcaagcttccaaaaagactttgataaagcagtggtcgatttcatgagtagcttaattgtggaggcagaaatagacgttggaaatgatccattgtccatcatagtcaaaaccctatcagaattatatccttcattgacaacactttgttctgaaatatttttgaccaaaggactaagtaagctttttaagaagagagtattcgaagagcaggatttacagtttacaaaagaactgctgcggttattatcttccgcgtgtattgatgagaccatgagaacgtatattacagaaaattaccttcaactattggaaagatcactaaacgtggaagatgtacaaatatattctgcattggtgttagttaagacatggtctttcacaaaattaacgtgtataaacttgaagcaactgtccgaaatctttataaacgctatttcaagacgtatcatgccaaaaattgaaaatgtcaatgaaagtgcggttaagctcgaggaggttcctaaagttgaaatgtccgttgaagcgctggcatatttaagtctaaaggcctcggttaagattatgattaggagtaacgagagctttactgaaattctattaactatgattaaaagccagaaaatgacgcactgtttatatggtctcttagttatcatggcaaatttgtccactttaccagaggaatccaatggtagttcacagtctatcaatgacttaaaaaattacgcagatttgaagggcccaggcgcagacaaggtaggcgcagagaaagaatcaaaggaagatattcttttgtttaacgaaaagtacatattaaggaccgagctgatttcctttttgaagagggaaatgcacaatttgagccccaattgtaaacaacaagtggttagggttatatataacataacccgctcgaaaaacttcattcctcaatgcatttcacaaggtggtacaactatcatcttagaatatttggccaataagcaggacataggggagccaatacggattctagggtgtcgggcattaacaagaatgctaatattcactaatccgggtttgatatttaaaaaatactctgcattaaacgctatccccttcttgttcgaattgttgccaaggtctacgccagtggatgacaatccgttacataacgacgaacaaataaagctgacagacaattacgaggcactattagctctgacgaacttggcatcatcggagacctctgatggtgaagaagtttgcaagcatatcgtatctacaaaagtatattggtccacgattgagaatctgatgctagacgaaaacgttcctttgcaaagatcaacattagagctcataagtaatatgatgagtcatccattaacgattgctgctaagttctttaacttggaaaatcctcagagtttgagaaattttaatatattggtgaaacttcttcagttatccgacgttgagtctcaacgagcagtggctgctatctttgctaacattgccaccacgattccattgatagctaaggaactgttaaccaagaaagaactaatcgaaaatgctattcaggtatttgcggatcaaattgatgacattgagttaagacaaaggttacttatgcttttttttggattattcgaagtgataccggataatggcactaacgaggtgtatccgttgctgcaagaaaatcaaaaattaaaggatgctttaaatatgtctttaaagagaggcgattcaggaccagagttttcagcggcaattcccgttatccttgctaaaattaaagtctaa

SEQ ID NO: 10210 - DNA, 2370 bp, Artificial Sequence
  Description of Artificial Sequence: Synthetic polynucleotide
atgccattatgtgagaaagggaatgatccaatcgatagctctactattgatagcctctgcgctgcatttgacaagactttgaaatccacccctgatgtccaaaaatacaatgatgctataaatacaattttccagttgaggcaaaaatctgaatctgggaaaatgccggctgatttaacgaatagtgaagcccttaaagatcgtcagaaaatcgaagaaatattgaccaggtcttaccaagaccattctgagtcccgcgtacatttatctaaacttatacagaatgatattcccttcgcactcaatttatttgaaatattatctagaagttccatccacgttttcgttggttgcttttccaataaagacgcaacaattgcattgttaaatgagttacaaattaggatacactatggcgaggacacccacgtcacgtatttattaagcataattttacaattattgaataagttcaagtacaatttcaaggaggtgagatttttagtgaaggaacttattttgcgcataagcgaagatgaagtaaaatctatgatgcttataatttttgctgaattacaaagcagcttccaaaaagactttgataaagcagtggtcgatttcatgagtagcttaattgtggaggcagaaatagacgttggaaatgatccattgtccatcatagtcaaaaccttatctgaattatatccttctttgacaacactttgttctgaaatatttttgaccaaaggattgagtaagctttttaagaagagagtattcgaagagcaggatttacagtttacaaaagaattattaagattattatcttccgcgtgtattgatgagaccatgagaacgtatattacagaaaattaccttcaattattggaaagatccttgaacgtggaagatgtacaaatatattctgcattggtgttagttaagacatggtctttcacaaaattaacgtgtataaacttgaagcaattatccgaaatctttataaacgctatttctagacgtatcatgccaaaaattgaaaatgtcaatgaaagtgcggttaagctcgaggaggttcctaaagttgaaatgtccgttgaagcgttggcatatttaagtttgaaggcctctgttaagattatgattaggagtaacgagagctttactgaaattttattaactatgattaaaagccagaaaatgacgcactgtttatatggtctcttagttatcatggcaaatttgtccactttaccagaggaatccaatggtagttctcagtctatcaatgacttaaaaaattacgcagatttgaagggcccaggcgcagacaaggtaggcgcagagaaagaatccaaggaagatattcttttgtttaacgaaaagtacatattaaggaccgagttgatttcctttttgaagagggaaatgcacaatttgagccccaattgtaaacaacaagtggttagggttatatataacataacccgctctaaaaacttcattcctcaatgcatttctcaaggtggtacaactatcatcttagaatatttggccaataagcaggacataggggagccaataagaattttggggtgtagagcattaacaagaatgttgatattcactaatccgggtttgatatttaaaaaatactctgcattaaacgctatccccttcttgttcgaattgttgccaaggtctacgccagtggatgacaatccgttacataacgacgaacaaataaagttaacagacaattacgaggcattattagctttgacgaacttggcatcttctgagacctctgatggtgaagaagtttgcaagcatatcgtatctacaaaagtatattggtccacgattgagaatttaatgttggacgaaaacgttcctttgcaaagatctacattagagctcataagtaatatgatgagtcatccattaacgattgctgctaagttctttaacttggaaaatcctcagagtttgagaaattttaatatattggtgaaacttcttcagttatccgacgttgagtctcaaagagcagtggctgctatctttgctaacattgccaccacgattccattgatagctaaggaattattaaccaagaaagaattgatcgaaaatgctattcaggtatttgcggatcaaattgatgacattgagttaagacaaaggttacttatgcttttttttggattattcgaagtgataccggataatggcactaacgaggtgtatccgttgttgcaagaaaatcaaaaattaaaggatgctttaaatatgtctttaaagagaggcgattctggaccagagttttctgcggcaattcccgttatccttgctaaaattaaagtctga

SEQ ID NO: 10211 - DNA, 867 bp, Saccharomyces cerevisiae
atgtcggaagacgaattttttggtggtgataatgaagccgtttggaacggttccagattcagtgattcacctgagttccaaacgttgaaagaagaggttgctgcagagttatttgaaataaatgggcaaataagcacgctgcagcagtttaccgcgacacttaagtcatttatagatcggggagatgttagtgcgaaagttgtggaaagaattaataagagatctgtggcaaagatagaagaaataggcgggctcattaaaaaggtcaatacatcagtgaaaaagatggatgcgattgaggaagctagcctggataagactcaaataatagcgagagagaaacttgtgagggatgtcagttactcttttcaagagtttcaaggtattcagcggcagtttacccaagtaatgaaacaagttaatgaaagagcaaaagaatctcttgaagcaagtgagatggcaaatgatgctgctttattagatgaagaacaaaggcagaatagctcaaaaagtactcgaataccaggcagccaaatagtcattgagagagacccgataaataacgaagagtttgcttatcagcaaaatcttatcgagcaaagagaccaggaaatcagcaatattgaaagaggtataacggaactgaacgaagtttttaaagatttgggaagtgttgttcaacagcagggtgtgctagttgacaatattgaagcaaatatttatacaacgtcagataacactcaattggcttcagacgagctaaggaaggccatgcggtaccaaaaacgtacgagcagatggagggtgtatttgttgattgtgcttctcgtaatgcttctttttatttttctcattatgaaattgtaa

SEQ ID NO: 10212 - DNA, 867 bp, Artificial Sequence
  Description of Artificial Sequence: Synthetic polynucleotide
atgtctgaagacgaattttttggtggtgataatgaagccgtttggaacggttccagattcagtgattctcctgagttccaaacgttgaaagaagaggttgctgcagagttatttgaaataaatgggcaaataagcacgttgcagcagtttaccgcgacacttaagagctttatagatagaggagatgttagtgcgaaagttgtggaaagaattaataagagatctgtggcaaagatagaagaaataggcgggctcattaaaaaggtcaatacatctgtgaaaaagatggatgcgattgaggaagctagcttagataagactcaaataatagcgagagagaaacttgtgagggatgtcagttactcttttcaagagtttcaaggtattcagagacagtttacccaagtaatgaaacaagttaatgaaagagcaaaagaatctcttgaagcaagtgagatggcaaatgatgctgctttattagatgaagaacaaaggcagaatagcagtaaaagtactagaataccaggcagccaaatagtcattgagagagacccgataaataacgaagagtttgcttatcagcaaaatcttatcgagcaaagagaccaggaaatcagcaatattgaaagaggtataacggaattgaacgaagtttttaaagatttgggaagtgttgttcaacagcagggtgtgcttgttgacaatattgaagcaaatatttatacaacgtctgataacactcaattggcttctgacgagttgaggaaggccatgagataccaaaaacgtacgagcagatggagggtgtatttgttgattgtgcttctcgtaatgcttctttttatttttctcattatgaaattgtga

SEQ ID NO: 10213 - DNA, 1101 bp, Saccharomyces cerevisiae
atgctgtggaaaaattatgttctatccagttcccgaataacacgtaggcttcataagtcacctagaaagagcagcttctctaagaacttttttatcacaggctgcctactgacagttggagcagtaagcagttatttaacctacaggtacacaagtgagagggaaaacaaacatgagttatctccatcttattttgtcaagtacaagatttcacacaagcgagatattgattcatcacattttttattggaagtaactccgttgtttaagcagaaagttaacatatggtcattgatgactgcggaaaatctgtggtccgtcgagatcaaacaaccggaagtcatggtggtccgcaattatacgcctctaccgcttaaatttaacccagcttcaaaagagattgaaatcttaaaagatggtgacaatgcagatggaaaattatctttctatattaagaagtatgagaatggagaagttgcaagatggttacaccatcttcccaagggacatataattgaaataagaggcccgtttatcgattatgagtttcctcatttgcctaatgagctaaaaagatctcgcgattgtttatacatggataatcgcaatgaaaggggcaataacgttagagaaaattcccaatttatttaccagccttatgacataatgatgttcaccgctggtaccggaatagttactgcgttgcaactacttttgactgaatcaccatttagaggtactataaagttatttcatacggataagaacattaaacaactgggacccttgtatcctatccttttaagacttcaagcttcaaacagggtccagttaaaaatttttgaaacagaccgacaaactaaacaagacgtattgaaaagtatccagaaatcaatcacgaagccctacccatacaaaggtctgctccccttttccaacgttaacaacaagaatattatgcctgtgttggcattggtatgcggccccgaaagttatattagtagcatatctggaagaaaatacgatcttaatcagggaccagtaggagggttactttccaaagaaggctggaactccgataatgtgtataaactttcataa

SEQ ID NO: 10214 - DNA, 1101 bp, Artificial Sequence
  Description of Artificial Sequence: Synthetic polynucleotide
atgttatggaaaaattatgttttatccagttccagaataacacgtaggcttcataagtctcctagaaagagcagcttctctaagaacttttttatcacaggctgcttattaacagttggagcagtaagcagttatttaacctacaggtacacaagtgagagggaaaacaaacatgagttatctccatcttattttgtcaagtacaagatttctcacaagagagatattgattcttctcattttttattggaagtaactccgttgtttaagcagaaagttaacatatggtctttgatgactgcggaaaatttatggtccgtcgagatcaaacaaccggaagtcatggtggtccgcaattatacgcctttgccgcttaaatttaacccagcttccaaagagattgaaatcttaaaagatggtgacaatgcagatggaaaattatctttctatattaagaagtatgagaatggagaagttgcaagatggttacaccatcttcccaagggacatataattgaaataagaggcccgtttatcgattatgagtttcctcatttgcctaatgagttgaaaagatctcgcgattgtttatacatggataatcgcaatgaaaggggcaataacgttagagaaaattcccaatttatttaccagccttatgacataatgatgttcaccgctggtaccggaatagttactgcgttgcaattacttttgactgaatctccatttagaggtactataaagttatttcatacggataagaacattaaacaattaggacccttgtatcctatccttttaagacttcaagcttctaacagggtccagttaaaaatttttgaaacagacagacaaactaaacaagacgtattgaaaagtatccagaaatctatcacgaagccctacccatacaaaggtttactccccttttccaacgttaacaacaagaatattatgcctgtgttggcattggtatgcggccccgaaagttatattagtagcatatctggaagaaaatacgatcttaatcagggaccagtaggagggttactttccaaagaaggctggaactccgataatgtgtataaactttcctga

SEQ ID NO: 10215 - DNA, 2628 bp, Saccharomyces cerevisiae
atgagattattaaagtatcctttggatattcataatgaacaagtgaatgccttagctgcccttggtccctatatcatattggcaggcagtgggggtcacgtgatggcgtggagacaacaacaactagtcgatactgcattcgatagggttatgattaaggatttaaagccagaagtttctttccaggtggatcaggatactaccggtgatatttttttcataacaggtgatctcgaaacattgtatattggatctgaacatcgtctgtggggttattcaggttggctctgtagagatacaaataacatcaattctgtcgaaaaaatgaacagtaagcttctgttcgagtgtaaatctccaagcacaataacggatgtgaaatatgacataaacttaggtatcttatttgttcttttaagtaatgaaaataagatactattatttcggcataaaacctttgataaactctctgaaataactattgacaaggcgagcaaacctattacaggcataatagatcctactggccaaacttttactgttatgacttcagatagatcaattttagtctatcaaattaacaaaacgggtacacacaaactcataaataaacttacgcagcatgtacaaatgtatccattacattatagaatctcaatgtcacctcaggcagacattttaccagtgataaactcggtgaaaggtgtgccgaataatgctaccagctgtaccgctttacttgacagaaataacaactacaaagttacaaaaacactggtaacaccttcttcaaatggatgtagagttcttgtttattctccagcattttatgaaaagcctaatttgaaaaagggcaccagcacacgctataatttaatcgccacttcgggatctacagacggtactattttggtttggaatacgaagagaatgaaacctttgtttaatgctctccaggtttcctccaccgcaataaacgatatgtcttggtcacaggatgggttcaccttgtttgccatttcaaacgacgcgacattgtatacattcgcattccaagagaaggatttaggtgtagcattgcctcaaacggaaatcaaatcgttacaagaagtaaacaaaaagcttccaaagcttgaagagccgttagcagaacaaataccgaaaagtttcccagaaaacatcaaattagaagaatctgcaagcgcagcacctattccaaacgatattggtagatctgccgtgggcaagaaaccgaccaaaaaaaaaacggctaacaatcaaactaatggcatcaaaactatccagagcacatcaatggaattcaacactccatcatacactgtgccaagggatttgaagagaaagccaaaagaggcaactccaagtaacattgcccctggcagcaaaaagcagaaaaaagagctacagccaattgactttttagataccggcttgctcctacccaatacgtctttctcaaggattagacttgcaacaccgaaaatcagatctacatttaaatactctccaattaataatccgaatttaatcctcgatgttaagaatggatctggcaatgaacaaaggccgacaattgtcaagcttacctcaaaagttctcgatcaagatcaagttctatttcaagattttattccaaaactcataacaatctgcacagcaggtgacaccttttggtcattctgtagtgaggacggaagtatttacatatattctgattcgggtagaaaactaatggctcccctagtattaggagttagcattagtttccttgaagcatgtggaacttatttactttgcttaacaagcataggggagctttattgttggaacatagagcagaagaagctggcttttcccaccaacactatttatccattgttaaacccgtcattgcgatactcagatgatatattgaccagagctgaaaatataacattgtgctctattacaaaaaagggtgtgccactagttacactgagtaatggcgatggttatttgttcgataagaacatggaaacatggcttctggtaagcgatgggtggtgggcctatggttcgcagtactgggacactactaatactactgggttgtcttctagcaaagcaaataccgactcttttaatggcagtgaatctaatattaatgaaatagttagtgatatcaagaatgataatcaaagtatcattaactttttggaatgcaaaacgaatgacgaacttaatagaaagggtaggattaagaatttacagagatttgctaggacaatattaatgaaagagggatttgaaaatatggaggagatcgtaactttgtctcacctggaaaataaaatcctaataagtatcagattggaggagcctgaagagttttcgaagctaatgatggtttattgcatccgtctgagtgaattggggtatatggaccgtttgaacgatgtttttcaatggttatatgatgatctccccatcagtggtaccgggtcagcatttgccgataaagattttaagaggaaccttctaaaaaagatactaattgcatgcggtgatatcagacaggttcaaagagttactacacgttatgccaaggaaatgaatataatatcttag

SEQ ID NO: 10216 - DNA, 2628 bp, Artificial Sequence
  Description of Artificial Sequence: Synthetic polynucleotide
atgagattattaaagtatcctttggatattcataatgaacaagtgaatgccttagctgcccttggtccctatatcatattggcaggcagtgggggtcacgtgatggcgtggagacaacaacaattggtcgatactgcattcgatagggttatgattaaggatttaaagccagaagtttctttccaggtggatcaggatactaccggtgatatttttttcataacaggtgatctcgaaacattgtatattggatctgaacatcgtttatggggttattctggttggctctgtagagatacaaataacatcaattctgtcgaaaaaatgaacagtaagcttttattcgagtgtaaatctccaagcacaataacggatgtgaaatatgacataaacttaggtatcttatttgttcttttaagtaatgaaaataagatattattatttagacataaaacctttgataaactctctgaaataactattgacaaggcgagcaaacctattacaggcataatagatcctactggccaaacttttactgttatgacttctgatagatctattttagtctatcaaattaacaaaacgggtacacacaaactcataaataaacttacgcagcatgtacaaatgtatccattacattatagaatctctatgtctcctcaggcagacattttaccagtgataaactctgtgaaaggtgtgccgaataatgctaccagctgtaccgctttacttgacagaaataacaactacaaagttacaaaaacattggtaacaccttcttccaatggatgtagagttcttgtttattctccagcattttatgaaaagcctaatttgaaaaagggcaccagcacacgctataatttaatcgccacttctggatctacagacggtactattttggtttggaatacgaagagaatgaaacctttgtttaatgctctccaggtttcctccaccgcaataaacgatatgtcttggtctcaggatgggttcaccttgtttgccatttccaacgacgcgacattgtatacattcgcattccaagagaaggatttaggtgtagcattgcctcaaacggaaatcaaatctttacaagaagtaaacaaaaagcttccaaagcttgaagagccgttagcagaacaaataccgaaaagtttcccagaaaacatcaaattagaagaatctgcaagcgcagcacctattccaaacgatattggtagatctgccgtgggcaagaaaccgaccaaaaaaaaaacggctaacaatcaaactaatggcatcaaaactatccagagcacatctatggaattcaacactccatcttacactgtgccaagggatttgaagagaaagccaaaagaggcaactccaagtaacattgcccctggcagcaaaaagcagaaaaaagagttacagccaattgactttttagataccggcttgctcttgcccaatacgtctttctctaggattagacttgcaacaccgaaaatcagatctacatttaaatactctccaattaataatccgaatttaatcctcgatgttaagaatggatctggcaatgaacaaaggccgacaattgtcaagcttacctccaaagttctcgatcaagatcaagttttatttcaagattttattccaaaactcataacaatctgcacagcaggtgacaccttttggagtttctgtagtgaggacggaagtatttacatatattctgattctggtagaaaattaatggctcccttagtattaggagttagcattagtttccttgaagcatgtggaacttatttactttgcttaacaagcataggggagctttattgttggaacatagagcagaagaagttggcttttcccaccaacactatttatccattgttaaacccgtctttgagatactctgatgatatattgaccagagctgaaaatataacattgtgctctattacaaaaaagggtgtgccattagttacattgagtaatggcgatggttatttgttcgataagaacatggaaacatggcttttggtaagcgatgggtggtgggcctatggttctcagtactgggacactactaatactactgggttgtcttctagcaaagcaaataccgactcttttaatggcagtgaatctaatattaatgaaatagttagtgatatcaagaatgataatcaaagtatcattaactttttggaatgcaaaacgaatgacgaacttaatagaaagggtaggattaagaatttacagagatttgctaggacaatattaatgaaagagggatttgaaaatatggaggagatcgtaactttgtctcacttggaaaataaaatcttaataagtatcagattggaggagcctgaagagttttccaagttgatgatggtttattgcatccgtttgagtgaattggggtatatggaccgtttgaacgatgtttttcaatggttatatgatgatctccccatcagtggtaccgggtctgcatttgccgataaagattttaagaggaaccttttgaaaaagatattgattgcatgcggtgatatcagacaggttcaaagagttactacacgttatgccaaggaaatgaatataatatcttga

SEQ ID NO: 10217 - DNA, 777 bp, Saccharomyces cerevisiae
atgggcagtagatcggagaatgtgggaacagtgactagagaaggctccagagtggaacaagatgatgtcctcatggatgatgactctgactcatcggaatacgtggatatgtggatcgatttatttcttgggagaaaaggccatgaatatttctgtgatgtcgatcctgagtacatcactgatcgttttaatctgatgaacttgcaaaagacagtttcaaaattttcctacgtggtacaatatattgtggatgatttggatgatagtatcctagagaatatgacacatgcccgtttagaacaattagaatcagattcccggaagctgtatggtctcatccatgcacgctacattataactatcaaaggattgcaaaaaatgtacgctaagtacaaagaggcggactttggaagatgtccccgtgtgtattgtaatttacaacagttgttaccggttggtttgcatgacattcctggtatagattgtgtcaagttatattgtccatcttgtgaggatctttatataccaaaatcatcgagacatagttccattgatggtgcatactttggaacaagttttccaggtatgtttttgcaagcatttccagatatggtacccaaacacccaactaaaagatatgttccaaaaatatttggatttgaattacataaacaagctcaactgacaaggtggcaagaactacaacgactcaagttagttgagaaacttgaatccaaagatgttgatttgacgaaaagtggtggttttaaaacctaa

SEQ ID NO: 10218 - DNA, 777 bp, Artificial Sequence
  Description of Artificial Sequence: Synthetic polynucleotide
atgggcagtagaagtgagaatgtgggaacagtgactagagaaggctccagagtggaacaagatgatgtcctcatggatgatgactctgactccagtgaatacgtggatatgtggatcgatttatttcttgggagaaaaggccatgaatatttctgtgatgtcgatcctgagtacatcactgatcgttttaatttaatgaacttgcaaaagacagtttccaaattttcctacgtggtacaatatattgtggatgatttggatgatagtatcttggagaatatgacacatgcccgtttagaacaattagaaagtgattccagaaagctttatggtctcatccatgcacgctacattataactatcaaaggattgcaaaaaatgtacgctaagtacaaagaggcggactttggaagatgtccccgtgtgtattgtaatttacaacagttgttaccggttggtttgcatgacattcctggtatagattgtgtcaagttatattgtccatcttgtgaggatctttatataccaaaaagcagcagacatagttccattgatggtgcatactttggaacaagttttccaggtatgtttttgcaagcatttccagatatggtacccaaacacccaactaaaagatatgttccaaaaatatttggatttgaattacataaacaagctcaattgacaaggtggcaagaattacaaagactcaagttagttgagaaacttgaatccaaagatgttgatttgacgaaaagtggtggttttaaaacctga

SEQ ID NO: 10219 - DNA, 858 bp, Saccharomyces cerevisiae
atgaagtttttactgcagcaaataagaaatatgcatgttaagcctataaaaatgcgatggttgacaggtggtgtcaattatagttatttactaagcactgaagacaggagaaactcatggctgattgaccctgcagaaccacttgaggtgtcgccaaaattaagcgccgaagagaaaaaaagtattgatgctattgtcaatacacatcaccattatgaccattcgggggggaacctagcgctttatagtatcttgtgccaagaaaactcaggtcacgatattaaaataattggtggatctaagtcctccccgggtgtcactgaagtacccgataatttgcagcagtatcacttgggtaacttaagagtaacatgtattaggactccatgccatacaaaagattccatatgctattatatcaaagatttagaaacaggtgagcagtgcatcttcacaggcgacactttattcattgccggttgtgggaggtttttcgagggcacaggaagagatatggacatggccttaaaccagataatgttaagggctgttggtgagacgaactggaataaggttaaaatataccctggtcatgagtacaccaaaggcaatgttagctttatcagagcaaaaatctattccgatatagggcagaacaaggagtttgatgcgttggaacagtattgcaaatctaacgagtgcaccaccggtcacttcaccctgagagatgaactaggttataacccattcatgagattggatgatcgtgccgttagactagcagtcggcgatactgctgggacttatcccagatccgtagtgatgcaagagttaagaaagcttaaaaacgctatgtaa

SEQ ID NO: 10220 - DNA, 858 bp, Artificial Sequence
  Description of Artificial Sequence: Synthetic polynucleotide
atgaagtttttattgcagcaaataagaaatatgcatgttaagcctataaaaatgagatggttgacaggtggtgtcaattatagttatttattaagcactgaagacaggagaaacagttggttgattgaccctgcagaaccacttgaggtgtctccaaaattaagcgccgaagagaaaaaaagtattgatgctattgtcaatacacatcaccattatgaccattctggggggaacttggcgctttatagtatcttgtgccaagaaaacagtggtcacgatattaaaataattggtggatctaagtcctccccgggtgtcactgaagtacccgataatttgcagcagtatcacttgggtaacttaagagtaacatgtattaggactccatgccatacaaaagattccatatgctattatatcaaagatttagaaacaggtgagcagtgcatcttcacaggcgacactttattcattgccggttgtgggaggtttttcgagggcacaggaagagatatggacatggccttaaaccagataatgttaagggctgttggtgagacgaactggaataaggttaaaatataccctggtcatgagtacaccaaaggcaatgttagctttatcagagcaaaaatctattccgatatagggcagaacaaggagtttgatgcgttggaacagtattgcaaatctaacgagtgcaccaccggtcacttcaccttgagagatgaattgggttataacccattcatgagattggatgatcgtgccgttagattagcagtcggcgatactgctgggacttatcccagatccgtagtgatgcaagagttaagaaagcttaaaaacgctatgtga

SEQ ID NO: 10221 - DNA, 1236 bp, Saccharomyces cerevisiae
atggaagaaaaggaaggtatcaaggattcttctctccttgagaagagtaatgttccggaatcaattaatgaggatatttcaaagacgacggatgtggatctaaattccgatgggaaaaaggataatgacacttctgccaaggatggtacacctaaggttgaagaaaaggtgaacaagtcctcaggaattgatgaggacgaagtggtgacacccgctgaggatgcaaaagaagaagaggaggagcatccccccttacctgccagaaggaagtctgaggaggagccatctaaagagaatccaatattgcaagaattgaaggatgcttttcccaatttggaagaaaaatacattaaagcggtgatcattgcgtcccagggtgttttgagcccagctttcaatgccttactattcctatcagatcccgaatctggtaaagatatcgagttaccaacacaacctgtaagaaagaacccagaggcgccggcaagaagacgacaaactcaattagaacaagacgaattattggcacggcaattagatgagcaattcaacagctcacattcccgtcgtcgtaatcgtgatcgcgcaactagaagcatgcatgaacagcgcagaagacgtcataatccgaacgaaagggagcaacatcacgaagacagtgaggaagaagattcgtggtcgcaatttgtagaaaaggacctgccagagcttacggacagagccggtcggtcattacaggacacagcaaacaaagttagtaactggataagtgatgcttaccggagaaactttgcgtcaggtaatgagcaaaacgacaaccaacatggtcaccaagatcagcaagaatgggagccagagattgtggatttgtcacaaggcgggaaaaattcaagaccccagcaacctgagagaagaagattcaattcgtttggcgttcaagtcggtgatgactctttagaaagccacggaatcacactacacaacgaagatggatttgaagatgatgaagatgtgccacctcagttaccaacgagaacaaaatctggtgagtcgactggaaaagtagtggcagagacaacctacattgatactccagatacagaaacgaagaagaaatggcagccgctaccaccggaacccctggatactacaccaactaaagtaaacgctgtttctagaaataagaaaaatccggatgaggatgaattcttaatcaatagtgacgacgagatgtaa

SEQ ID NO: 10222 - DNA, 1236 bp, Artificial Sequence
  Description of Artificial Sequence: Synthetic polynucleotide
atggaagaaaaggaaggtatcaaggattcttctctccttgagaagagtaatgttccggaaagtattaatgaggatatttccaagacgacggatgtggatttgaattccgatgggaaaaaggataatgacacttctgccaaggatggtacacctaaggttgaagaaaaggtgaacaagtccagtggaattgatgaggacgaagtggtgacacccgctgaggatgcaaaagaagaagaggaggagcatccccccttacctgccagaaggaagtctgaggaggagccatctaaagagaatccaatattgcaagaattgaaggatgcttttcccaatttggaagaaaaatacattaaagcggtgatcattgcgtcccagggtgttttgagcccagctttcaatgccttattattcttaagtgatcccgaatctggtaaagatatcgagttaccaacacaacctgtaagaaagaacccagaggcgccggcaagaagaagacaaactcaattagaacaagacgaattattggcaagacaattagatgagcaattcaacagctctcattcccgtcgtcgtaatcgtgatcgcgcaactagaagcatgcatgaacagcgcagaagacgtcataatccgaacgaaagggagcaacatcacgaagacagtgaggaagaagattcttggtctcaatttgtagaaaaggacttaccagagcttacggacagagccggtagatctttacaggacacagcaaacaaagttagtaactggataagtgatgcttacagaagaaactttgcgtctggtaatgagcaaaacgacaaccaacatggtcaccaagatcagcaagaatgggagccagagattgtggatttgtctcaaggcgggaaaaattctagaccccagcaacctgagagaagaagattcaattcttttggcgttcaagtcggtgatgactctttagaaagccacggaatcacattacacaacgaagatggatttgaagatgatgaagatgtgccacctcagttaccaacgagaacaaaatctggtgagtctactggaaaagtagtggcagagacaacctacattgatactccagatacagaaacgaagaagaaatggcagccgttaccaccggaacccttagatactacaccaactaaagtaaacgctgtttctagaaataagaaaaatccggatgaggatgaattcttaatcaatagtgacgacgagatgtga

SEQ ID NO: 10223 - DNA, 1461 bp, Saccharomyces cerevisiae
atggacgatataatcacgcaagtttctccagataatgcagagtccgctccgattctacaagaacagcaacagcaacagaactcacagtacgaaggtaacgaggaggattatggtgattcattgattcatttgaatattcaagaaaaccattatttcattacgagggaccagttgatgtctctacctgaatccctattactgtgtttatttccctcaggtgtttttttggaccgttgtggtcaggtcattactaatttgaccagagacgatgaggtctacattgttaatttccctcctgattgttttgagtacatcatggagatatatacaaaagcgcatgatgatttgtataatcatcctgtggagaaattttttgacagaccatcaagtagctttgtttcgaatgcaaagggattttttggactgagtagcaataattcaatttcgagcaacaatgagcaggatattttacatcaaaagcccgctattattgttttgagagaagacttggattattattgtgtacctcaggaggaatttcagtttgattccactaatgaagaaaataatgaggatttattgcgacattttatggctcaagtgaaaatggctgctggcagttatttaacttcaaaaacatcgattttccaaggtttgtattcttcgaatagactaaagcaacaacagcaacaacagaaaattgaaaaggggtccaattcttcttcaaatactaaatctacttcgaaaaaattgggacctgctgaacaacatttaatggatatgttgtgctcctccggattcaccaaggaaacttgttggggtaacagaactcaagaaactggcaaaacggttataagttcactgtctctttgccgattggctaacgagacaactgaaggatttaggcaaaaatttaacgaggctaaggctaagtgggaggcagagcacaaaccttctcaagacaacttcatcaccccaatgcaatctaacatatcgattaactctttatctgcaagtaaatctaacagtaccatttctacagcaaggaatttaacaagcggaagtacagcacctgctacagcacgtgataagagaaaatcaaggctgtcgaaactagcagataacgttcgttcgcactcttcctcgagacatagttcgcagaccagaagtaaacctccggagttgcccaaattgtatgatctagtgccaaaacctaatatcaacgctaagctactattattttggagaaaacctgctcgtaaatgttggtggggtgaagaagacatagagctagaagtggaagtcttcggctcttggaaagatgaatcaaagaaaatcattgaattgatcttgccaacaaacgttgatcctgaagcagaactacataaaatcattgtacccgtccgattacatattcgtagagtttggactttagagttgagcgttattggggtgcagtga

SEQ ID NO: 10224 - DNA, 1461 bp, Artificial Sequence
  Description of Artificial Sequence: Synthetic polynucleotide
atggacgatataatcacgcaagtttctccagataatgcagagtccgctccgattttacaagaacagcaacagcaacagaactctcagtacgaaggtaacgaggaggattatggtgattctttgattcatttgaatattcaagaaaaccattatttcattacgagggaccagttgatgtctttgcctgaatccttattattatgtttatttccctctggtgtttttttggaccgttgtggtcaggtcattactaatttgaccagagacgatgaggtctacattgttaatttccctcctgattgttttgagtacatcatggagatatatacaaaagcgcatgatgatttgtataatcatcctgtggagaaattttttgacagaccatctagtagctttgtttctaatgcaaagggattttttggattgagtagcaataattctatttctagcaacaatgagcaggatattttacatcaaaagcccgctattattgttttgagagaagacttggattattattgtgtacctcaggaggaatttcagtttgattccactaatgaagaaaataatgaggatttattgagacattttatggctcaagtgaaaatggctgctggcagttatttaacttctaaaacatccattttccaaggtttgtattcttccaatagattaaagcaacaacagcaacaacagaaaattgaaaaggggtccaattcttcttccaatactaaatctacttctaaaaaattgggacctgctgaacaacatttaatggatatgttgtgctcctccggattcaccaaggaaacttgttggggtaacagaactcaagaaactggcaaaacggttataagttctttatctctttgcagattggctaacgagacaactgaaggatttaggcaaaaatttaacgaggctaaggctaagtgggaggcagagcacaaaccttctcaagacaacttcatcaccccaatgcaatctaacatatctattaactctttatctgcaagtaaatctaacagtaccatttctacagcaaggaatttaacaagcggaagtacagcacctgctacagcacgtgataagagaaaatctaggctttctaaattggcagataacgttcgttctcactcttccagcagacatagttctcagaccagaagtaaacctccggagttgcccaaattgtatgatttggtgccaaaacctaatatcaacgctaagttattattattttggagaaaacctgctcgtaaatgttggtggggtgaagaagacatagagttagaagtggaagtcttcggctcttggaaagatgaatccaagaaaatcattgaattgatcttgccaacaaacgttgatcctgaagcagaattacataaaatcattgtacccgtcagattacatattcgtagagtttggactttagagttgagcgttattggggtgcagtga

SEQ ID NO: 10225 - DNA, 474 bp, Saccharomyces cerevisiae
atgatagaggcgttggaaatagttctattgctcgttatacaatcacttcaatatatctgtcgcacatgcatagcttttttgctaataccattcttaggcctgtatgcattcgatctcttcctatacgtttatcggatgatactttatctgtcacaaatgttcaattacaagagaaaactaggacgttctaaaacaaataataggccgcatagtcccaggctacataagatatacagtagtggggattgcatggataccttaattggccaagtaagggatttgagagtatttttgttatccacgatccacagccactctaaaagattcttttctacgagatttcagacaaaatcaggcattaactctgctattgacgcgaatgatgttgaaacaacatctgacgtatctagttttacaaatttacatttaacaaggtcatcggaagaaggttattatatcgcaggatcgatataa

SEQ ID NO: 10226 - DNA, 474 bp, Artificial Sequence
  Description of Artificial Sequence: Synthetic polynucleotide
atgatagaggcgttggaaatagttttattgctcgttatacaatctcttcaatatatctgtcgcacatgcatagcttttttgttaataccattcttaggcttgtatgcattcgatctcttcttgtacgtttatagaatgatactttatttatctcaaatgttcaattacaagagaaaattaggacgttctaaaacaaataataggccgcatagtcccaggttacataagatatacagtagtggggattgcatggataccttaattggccaagtaagggatttgagagtatttttgttatccacgatccacagccactctaaaagattcttttctacgagatttcagacaaaatctggcattaactctgctattgacgcgaatgatgttgaaacaacatctgacgtatctagttttacaaatttacatttaacaaggtccagtgaagaaggttattatatcgcaggatccatatga

SEQ ID NO: 10227 - DNA, 186 bp, Saccharomyces cerevisiae
atggacggtatgtttgctatgccaggcgcagctgcaggtgcggcctccccacaacaaccaaaatcaagattccaagctttcaaggaatctccactatacacaattgcactaaacggtgccttcttcgttgcaggtgttgcgtttattcaatctccactcatggacatgttggccccacaattataa

SEQ ID NO: 10228 - DNA, 186 bp, Artificial Sequence
  Description of Artificial Sequence: Synthetic polynucleotide
atggacggtatgtttgctatgccaggcgcagctgcaggtgcggcctccccacaacaaccaaaatctagattccaagctttcaaggaatctccattgtacacaattgcattgaacggtgccttcttcgttgcaggtgttgcgtttattcaatctccactcatggacatgttggccccacaattatga

SEQ ID NO: 10229 - DNA, 1449 bp, Saccharomyces cerevisiae
atgagtgatacaaagagagatccggccgatttactagcttctttaaagattgataatgagaaagaggatacaagtgaagtttcaacaaaagagactgttaagtcccaaccagaaaagactgctgattcgatcaagcctgcagaaaaattagttccaaaagttgaggaaaaaaaaacaaaacaggaggatagtaatttaatcagctcagaatatgaagttaaggtcaaacttgctgatatccaggctgacccaaattctccattgtacagtgctaaatcttttgatgaattaggattagcaccagaactactaaaggggatatatgctatgaaatttcaaaaaccatccaaaattcaagaaagggcgctgccattattattacataatccgcctaggaacatgattgctcagtctcaatcaggtacaggtaaaactgccgccttttctttaacgatgctaacaagagtaaacccagaagacgcatctccacaggcaatttgcttagccccctccagagaactggccagacaaacactagaagtcgttcaggaaatgggtaagttcacaaaaataaccagtcagttaattgttcccgattcttttgagaaaaacaagcaaattaatgctcaagtgattgttggtacgccgggcactgttcttgacctaatgcgtagaaaattgatgcagctacagaaaattaaaatttttgttttggatgaagccgataacatgttggatcagcagggtctaggtgaccagtgtattcgtgttaagagatttttacccaaggatactcaacttgttttgtttagtgctacttttgccgatgcagttaggcagtacgcaaagaagatcgttccaaatgctaatactttagaattacaaacaaatgaagttaatgttgatgccatcaaacaactatacatggactgcaaaaacgaagcagataagtttgatgttttaactgagctatatggtttaatgacaattggatcttccattatttttgttgcaaccaaaaaaaccgcaaacgttttatatgggaaattgaaaagtgaaggtcatgaagtttctatcttgcatggtgatttacagacacaagaaagagacagattaatagacgacttcagagagggtagatccaaagttttgattactactaatgtcctggcccgtggtattgatattcctactgtctcaatggttgtcaactatgatcttccaacgcttgctaacggacaagcagatccagctacttacattcacagaatcggtagaaccggtagattcggcagaaaaggtgttgccatttcctttgtacatgacaaaaattctttcaatattttatctgcaattcagaaatacttcggtgatatagaaatgactcgtgttccaacggatgattgggatgaagtcgaaaaaatagttaagaaagtgttaaaggattag

SEQ ID NO: 10230 - DNA, 1449 bp, Artificial Sequence
  Description of Artificial Sequence: Synthetic polynucleotide
atgagtgatacaaagagagatccggccgatttattagcttctttaaagattgataatgagaaagaggatacaagtgaagtttctacaaaagagactgttaagtcccaaccagaaaagactgctgattctatcaagcctgcagaaaaattagttccaaaagttgaggaaaaaaaaacaaaacaggaggatagtaatttaatcagctctgaatatgaagttaaggtcaaacttgctgatatccaggctgacccaaattctccattgtacagtgctaaatcttttgatgaattaggattagcaccagaattattgaaggggatatatgctatgaaatttcaaaaaccatccaaaattcaagaaagggcgttaccattattattacataatccgcctaggaacatgattgctcagtctcaatctggtacaggtaaaactgccgccttttctttaacgatgttaacaagagtaaacccagaagacgcatctccacaggcaatttgcttagccccctccagagaattggccagacaaacattagaagtcgttcaggaaatgggtaagttcacaaaaataaccagtcagttaattgttcccgattcttttgagaaaaacaagcaaattaatgctcaagtgattgttggtacgccgggcactgttcttgacttgatgcgtagaaaattgatgcagttacagaaaattaaaatttttgttttggatgaagccgataacatgttggatcagcagggtttaggtgaccagtgtattcgtgttaagagatttttacccaaggatactcaacttgttttgtttagtgctacttttgccgatgcagttaggcagtacgcaaagaagatcgttccaaatgctaatactttagaattacaaacaaatgaagttaatgttgatgccatcaaacaattgtacatggactgcaaaaacgaagcagataagtttgatgttttaactgagttgtatggtttaatgacaattggatcttccattatttttgttgcaaccaaaaaaaccgcaaacgttttatatgggaaattgaaaagtgaaggtcatgaagtttctatcttgcatggtgatttacagacacaagaaagagacagattaatagacgacttcagagagggtagatccaaagttttgattactactaatgtccttgcccgtggtattgatattcctactgtctccatggttgtcaactatgatcttccaacgcttgctaacggacaagcagatccagctacttacattcacagaatcggtagaaccggtagattcggcagaaaaggtgttgccatttcctttgtacatgacaaaaattctttcaatattttatctgcaattcagaaatacttcggtgatatagaaatgactcgtgttccaacggatgattgggatgaagtcgaaaaaatagttaagaaagtgttaaaggattga

SEQ ID NO: 10231 - DNA, 1335 bp, Saccharomyces cerevisiae
atgtttgtttcaccacctccagcaacagcgaggaaccaagtattagggaaaagaaaatcgaaaagacatgacgaaaatccaaagaatgttcaacccaacgctgacacagaaatgacaaatagcgttccttctattggattcaacagcaatcttccacataataaccaagaaataaacacaccaaatcactataatttgagttccaattcaggaaatgttaggagcaacaacaattttgttactacaccaccagaatatgcagacagggcaagaatagaaatcataaaaaggttattgcctactgcaggaactaaacctatggaagtgaacagtaatactgcagaaaatgcaaatatccaacacataaataccccggacagtcaaagttttgtttcagaccattcatcttcatacgaatcgagtatattttcacagccatctactgctcttacggacatcaccacaggcagctcgttaattgatacaaaaacacctaagttcgtcacagaagtaacacttgaagacgctttacccaaaacattctatgatatgtattctcccgaagttctgatgtctgatccagcaaatatactttataacggacgtcctaagtttacaaagcgcgaattgctggactgggatctaaacgatatacgatccttgttaattgtggaacaattaaggccagaatggggttcccagttaccgacggtagtgacctccggtataaacttaccgcaattcagactacaattacttcccctaagttccagtgatgagtttataatagcgacattggttaactcagacttatacatagaagcaaatctagaccgcaattttaagttgacaagcgcaaaatatacagttgcatcagcaagaaaaagacatgaagaaatgactgggtcaaaggaacccattatgcgtctatcaaagcctgaatggagaaatataattgagaactatttattaaatgttgccgtcgaggcccaatgcagatatgactttaaacaaaagcgctccgaatacaagagatggaaattactaaattcaaatttgaaaaggcctgacatgccgcctccaagcctcataccgcatggttttaaaatacatgactgcactaactctggtagtcttttaaaaaaggctttaatgaaaaatttgcaactaaaaaattataaaaatgatgctaagacattaggtgctggtacacagaaaaatgtcgttaataaggtttctctaacttcagaggagagggctgccatctggtttcaatgccaaacacaggtttatcaaaggttggggttagattggaagcctgatggaatgtcctag

SEQ ID NO: 10232 - DNA, 1335 bp, Artificial Sequence
  Description of Artificial Sequence: Synthetic polynucleotide
atgtttgtttctccacctccagcaacagcgaggaaccaagtattagggaaaagaaaatctaaaagacatgacgaaaatccaaagaatgttcaacccaacgctgacacagaaatgacaaatagcgttccttctattggattcaacagcaatcttccacataataaccaagaaataaacacaccaaatcactataatttgagttccaattctggaaatgttaggagcaacaacaattttgttactacaccaccagaatatgcagacagggcaagaatagaaatcataaaaaggttattgcctactgcaggaactaaacctatggaagtgaacagtaatactgcagaaaatgcaaatatccaacacataaataccccggacagtcaaagttttgtttctgaccattcttcttcctacgaaagtagtatattttcccagccatctactgctcttacggacatcaccacaggcagctctttaattgatacaaaaacacctaagttcgtcacagaagtaacacttgaagacgctttacccaaaacattctatgatatgtattctcccgaagttttgatgtctgatccagcaaatatactttataacggacgtcctaagtttacaaagcgcgaattgttggactgggatttgaacgatataagatccttgttaattgtggaacaattaaggccagaatggggttcccagttaccgacggtagtgacctccggtataaacttaccgcaattcagattacaattacttcccttgagttccagtgatgagtttataatagcgacattggttaacagcgacttatacatagaagcaaatttggaccgcaattttaagttgacaagcgcaaaatatacagttgcatctgcaagaaaaagacatgaagaaatgactgggtccaaggaacccattatgcgtttatccaagcctgaatggagaaatataattgagaactatttattaaatgttgccgtcgaggcccaatgcagatatgactttaaacaaaagcgctccgaatacaagagatggaaattattgaatagtaatttgaaaaggcctgacatgccgcctccaagcctcataccgcatggttttaaaatacatgactgcactaactctggtagtcttttaaaaaaggctttaatgaaaaatttgcaattgaaaaattataaaaatgatgctaagacattaggtgctggtacacagaaaaatgtcgttaataaggtttctttgacttccgaggagagggctgccatctggtttcaatgccaaacacaggtttatcaaaggttggggttagattggaagcctgatggaatgtcctga

SEQ ID NO: 10233 - DNA, 3021 bp, Saccharomyces cerevisiae
atgggtgttccgtcatttttcagatggctatctcgaaaatatccaaagatcatatccccagtattggaagagcaacctcagatagtcgacggtgtcatattgccgttggattattccgcctcaaatccaaacggtgagttagacaacttgtatttggatatgaatggtattgttcatccatgttcgcacccagaaaacaaaccgcctccagagactgaagatgaaatgcttttggcagtttttgaatataccaatcgtgtgttaaatatggctagaccacgcaaggtacttgttatggctgttgatggtgttgctcctcgtgccaaaatgaaccagcagagagcgcgtagatttaggagtgctagggatgctcagattgaaaacgaagccagggaagaaattatgagacagcgagaagaagttggtgagataatcgatgatgccgtcaggaacaagaaaacttgggattcaaatgcgatcactccaggcaccccatttatggataagcttgccgcggccctccgttattggacagcatttaaactggccactgaccctggttggaaaaacctgcaggtgattatcagtgacgccaccgtcccaggtgaaggtgagcacaaaataatgaatttcattaggtctcaaagagctgatcctgaatataatcccaacacaacgcactgtatatacggtttggatgctgatttaatttttttgggccttgccactcatgaaccacattttaaaattctaagagaagatgtttttgctcaagacaatcggaaaagaaataacttaaaagatactataaatatgactgaagaagaaaaacaatttctccaaaaacaaaattccgaacaacctttcttgtggctgcacataaatgttttgagggaatacttgtccgctgagttatgggttccgggtcttccatttacatttgatttagaaagggctatcgacgattgggttttcatgtgctttttctgtggtaatgactttttaccacatttaccatgcttagatgtcagagaaaatagtattgatattctcttggatatttggaaggtagtactaccgaaattgaaaacgtacatgacctgcgacggtgtcttgaacctcccttctgttgaaacgctattgcaacaccttggctcccgtgagggggatatcttcaaaactagacatattcaagaagccagaaagaaagaagcttttgaaagaaggaaagcgcagaaaaatatgtcaaaaggtcaagacaggcatcctacagtagctacggagcaactgcaaatgtatgacacacaaggaaatttagcaaaaggttcatggaacttgaccaccagtgatatggtaaggttgaaaaaggaactgatgcttgcgaacgaggggaacgaagaagcaatcgccaaagttaagcaacagagtgataagaacaatgaactgatgaaagatatcagcaaggaagaaattgatgatgctgttagtaaggctaacaaaactaattttaaccttgcagaagttatgaaacagaaaataataaataagaaacaccgtcttgaaaaggataatgaagaggaagaaattgctaaggatagcaaaaaagttaagacagagaaagcggaatcagagtgcgatctcgatgcagagatcaaagatgagattgtggctgacgtaaacgacagggaaaactctgaaactacagaagtatcaagagattcaccagtccacagcacagtgaatgtcagcgaaggtcccaaaaatggggtctttgatacagatgaatttgtcaaactattcgaacctggttaccacgaaagatattacacagctaaatttcacgttactcctcaagatattgaacagttaagaaaagatatggtaaaatgctatatcgaaggggtcgcctgggtactaatgtattactatcaaggttgtgcctcttggaattggttctatccgtaccattatgctcctctggcaacagatttccatgggttttctcacttggagataaagttcgaagaaggtactccatttttaccttacgaacaattgatgagtgttttaccagctgcatctggccatgctttgccaaaaattttccggtctttgatgtctgaacctgactctgaaatcattgatttttatcctgaagaatttcccatagatatgaatggtaagaagatgtcctggcaaggcatagcgttgctaccattcatcgatcaggatagactgttaacagctgttcgtgcacaatatcctttactttctgatgctgagagggcaagaaatattcgcggagaacctgttttattaataagtaacaagaatgctaattatgagaggttttcgaagaaattatactcaaaggaaaacaacaacaacaatgttgttgtgaagtttcaacacttcaagagtggtttaagtggtattgtatcaaaggacgttgaaggtttcgaattaaatgggaaaattgtatgtccgattcaaggtgggtcactgccaaatttatctaccaccttgattttaaagatgtcctatagattaattccgttgccatcgagaaataagtctattatactgaacgggttcattccgtcagaaccggtactaacagcatatgaccttgattccataatgtacaagtataataaccaaaattactcccgtcgctggaactttggtaatgatttgaagcaaaatattgttccagtaggaccaaagggtattactcagtacaaaccaagaactggtggctatcgagcattcttttattttgctgagctcagtagaaataatgtccaacccgcccacaactatggtaggaatagctacaacagtcaacccggcttcaacaatagcaggtatgatggtggaaacaataattacagacaaaattcaaattacaggaacaataactattccggaaatagaaatagtggacagtacagcggcaacagctactctcggaataacaagcaaagtcggtatgacaattcaagagcaaataggcgttag

SEQ ID NO: 10234 - DNA, 3021 bp, Artificial Sequence
  Description of Artificial Sequence: Synthetic polynucleotide
atgggtgttccgtcctttttcagatggttatctagaaaatatccaaagatcatatccccagtattggaagagcaacctcagatagtcgacggtgtcatattgccgttggattattccgcctctaatccaaacggtgagttagacaacttgtatttggatatgaatggtattgttcatccatgttctcacccagaaaacaaaccgcctccagagactgaagatgaaatgcttttggcagtttttgaatataccaatcgtgtgttaaatatggctagaccacgcaaggtacttgttatggctgttgatggtgttgctcctcgtgccaaaatgaaccagcagagagcgcgtagatttaggagtgctagggatgctcagattgaaaacgaagccagggaagaaattatgagacagagggaagaagttggtgagataatcgatgatgccgtcaggaacaagaaaacttgggattctaatgcgatcactccaggcaccccatttatggataagcttgccgcggccctccgttattggacagcatttaaattggccactgaccctggttggaaaaacttacaggtgattatcagtgacgccaccgtcccaggtgaaggtgagcacaaaataatgaatttcattaggtctcaaagagctgatcctgaatataatcccaacacaacgcactgtatatacggtttggatgctgatttaatttttttgggccttgccactcatgaaccacattttaaaattttaagagaagatgtttttgctcaagacaatagaaaaagaaataacttaaaagatactataaatatgactgaagaagaaaaacaatttctccaaaaacaaaattccgaacaacctttcttgtggttgcacataaatgttttgagggaatacttgtccgctgagttatgggttccgggtcttccatttacatttgatttagaaagggctatcgacgattgggttttcatgtgctttttctgtggtaatgactttttaccacatttaccatgcttagatgtcagagaaaatagtattgatattctcttggatatttggaaggtagtattaccgaaattgaaaacgtacatgacctgcgacggtgtcttgaacctcccttctgttgaaacgttattgcaacaccttggctcccgtgagggggatatcttcaaaactagacatattcaagaagccagaaagaaagaagcttttgaaagaaggaaagcgcagaaaaatatgtccaaaggtcaagacaggcatcctacagtagctacggagcaattacaaatgtatgacacacaaggaaatttagcaaaaggttcttggaacttgaccaccagtgatatggtaaggttgaaaaaggaattgatgcttgcgaacgaggggaacgaagaagcaatcgccaaagttaagcaacagagtgataagaacaatgaattgatgaaagatatcagcaaggaagaaattgatgatgctgttagtaaggctaacaaaactaattttaaccttgcagaagttatgaaacagaaaataataaataagaaacaccgtcttgaaaaggataatgaagaggaagaaattgctaaggatagcaaaaaagttaagacagagaaagcggaaagtgagtgcgatctcgatgcagagatcaaagatgagattgtggctgacgtaaacgacagggaaaactctgaaactacagaagtatctagagattctccagtccacagcacagtgaatgtcagcgaaggtcccaaaaatggggtctttgatacagatgaatttgtcaaattattcgaacctggttaccacgaaagatattacacagctaaatttcacgttactcctcaagatattgaacagttaagaaaagatatggtaaaatgctatatcgaaggggtcgcctgggtattaatgtattactatcaaggttgtgcctcttggaattggttctatccgtaccattatgctcctttggcaacagatttccatgggttttctcacttggagataaagttcgaagaaggtactccatttttaccttacgaacaattgatgagtgttttaccagctgcatctggccatgctttgccaaaaattttcagatctttgatgtctgaacctgactctgaaatcattgatttttatcctgaagaatttcccatagatatgaatggtaagaagatgtcctggcaaggcatagcgttgttaccattcatcgatcaggatagattattaacagctgttcgtgcacaatatcctttactttctgatgctgagagggcaagaaatattcgcggagaacctgttttattaataagtaacaagaatgctaattatgagaggttttccaagaaattatactccaaggaaaacaacaacaacaatgttgttgtgaagtttcaacacttcaagagtggtttaagtggtattgtatccaaggacgttgaaggtttcgaattaaatgggaaaattgtatgtccgattcaaggtgggtctttaccaaatttatctaccaccttgattttaaagatgtcctatagattaattccgttgccatctagaaataagtctattatattaaacgggttcattccgagtgaaccggtattaacagcatatgaccttgattccataatgtacaagtataataaccaaaattactcccgtcgctggaactttggtaatgatttgaagcaaaatattgttccagtaggaccaaagggtattactcagtacaaaccaagaactggtggctatagagcattcttttattttgctgagctcagtagaaataatgtccaacccgcccacaactatggtaggaatagctacaacagtcaacccggcttcaacaatagcaggtatgatggtggaaacaataattacagacaaaatagtaattacaggaacaataactattccggaaatagaaatagtggacagtacagcggcaacagctactctagaaataacaagcaaagtagatatgacaattctagagcaaataggcgttga

SEQ ID NO: 10235 - DNA, 1065 bp, Saccharomyces cerevisiae
atggtaccgaaccttcgttttaatatcacgatgattgtcatttggggtatactactgacaatacatgtcgtacagttactgatgcgccaatactggttttcaatcgcttttatatgcacaggtattttggaagttcttggatttatagggaggacgtggtcgcattctaatgtcgccgatatggacgcttttcttttgaacatgatttgtttgactattgcaccagttttcacaatgggtggtatttattatcaacttgcaaagcttatagaagtatacggccacaggttctctttattgccctctccaatggcgtattcttttattttcatatgttccgatatcgtatcgcttgtggtgcaagctgtaggcggtggcctgtgtggtgtggcggtcacagatggaacgtccacaacaaccggcaatcatgttttcattgctggtttggccattcaagttgcatcgatggccatctttcttatgttatggtttcacttccttttccgtatatatatatcggtaagatgggaacacataaattctagacctatctcattgagcctcttaaagatatcgcaaacagaagttgattatttatacagggaaaagttccattttttgagactcgaacctaaacgttgggtttttcattattttaatctggcaataaccgttgcggtactaaccatttttacccgttgttgttaccgtttggctgaattagttgtcggttgggatggctatctgatcacacacgagtggtattttattatcttagatgcattaatgatggccatcgctacggtcactttgaccatcttccaccctggatttgcgtttaaaggtagaagcacctcgattccaatcacaccgggccatgttgatcctgaaactttaccacatactgacgatgttgaagatatcttagatacttcggattcaaaacaatttgatattgaaaaggaggaattccaagcaagcatgaaatacccgattagcaccttcaaacaattcatgtccaaaatagctaacttgttttcctctaaaaagaaggctaaactttag

SEQ ID NO: 10236 - DNA, 1065 bp, Artificial Sequence
  Description of Artificial Sequence: Synthetic polynucleotide
atggtaccgaaccttcgttttaatatcacgatgattgtcatttggggtatattattaacaatacatgtcgtacagttattgatgcgccaatactggttttctatcgcttttatatgcacaggtattttggaagttcttggatttatagggaggacgtggtctcattctaatgtcgccgatatggacgcttttcttttgaacatgatttgtttgactattgcaccagttttcacaatgggtggtatttattatcaacttgcaaagcttatagaagtatacggccacaggttctctttattgccctctccaatggcgtattcttttattttcatatgttccgatatcgtatctcttgtggtgcaagctgtaggcggtggcctctgtggtgtggcggtcacagatggaacgtccacaacaaccggcaatcatgttttcattgctggtttggccattcaagttgcatctatggccatctttcttatgttatggtttcacttccttttccgtatatatatatctgtaagatgggaacacataaattctagacctatctctttgagcctcttaaagatatctcaaacagaagttgattatttatacagggaaaagttccattttttgagactcgaacctaaacgttgggtttttcattattttaatttggcaataaccgttgcggtattaaccatttttacccgttgttgttaccgtttggctgaattagttgtcggttgggatggctatttgatcacacacgagtggtattttattatcttagatgcattaatgatggccatcgctacggtcactttgaccatcttccaccctggatttgcgtttaaaggtagaagcacctctattccaatcacaccgggccatgttgatcctgaaactttaccacatactgacgatgttgaagatatcttagatacttctgattctaaacaatttgatattgaaaaggaggaattccaagcaagcatgaaatacccgattagcaccttcaaacaattcatgtccaaaatagctaacttgttttcctctaaaaagaaggctaaactttga

SEQ ID NO: 10237 - DNA, 1239 bp, Saccharomyces cerevisiae
atggctaaaagacccttaggtttaggtaaacaaagtagagaaaagaaaagaaaggtggaaagtgtcgaaaagaagagcgatgaaccttccagagaatccacacctgtgagaagtcaaatgagtgttgagcttgacgatgatgctgatttagatgacgaattagctcagctgaaaggactgtggtctaaatattttcactctgacagagacgacgaatatgttttaaatggaatcgttcacgaatgtgacagattattgcgtctttctgaagaagataaagagattaagaagacgctgaacgatattttccatggtatatatgctctggctttatctgaattgactattttcaaggcaggcgatgaggaagccactgaagaaaagagaaaaaaagatgtatcctcattttttgaaagtgctatcgaaagagtcgaattaggtctttcgcatttccctgaatcccaatttctaaaactagttttagcaaagataattttccaaaggattccgttggaatatatttccaatctccatttgaaatcgaaggataaaaaacttgatcttgtaggacagcttgaacatggtaagaagcatttttcaatttatgaaaacgatactgaatttacttttgaaatcctacaaatggtgaatgacttattggacatcgtcgagaattttggtcgcgaacaatctattcaagagggcatagatagcgataatgaagaggaagaggaactcattgatattgagttggaaccagaacaccctgtatatcccctacaacaatcgctagaagcgaattacgagtggctaagaaaccattttgataaattgcttgacaacacaaatacagatgtgaaaatctatgcatcaatagctaacaccctaggggaactatacctaaaaaaagctgaagaaccaagtaaagttttcttaagcctacagtacgatgatggcggttctgaaaaggttagcgacaaggaagccaagaacgcccaagaaaccgctttgaagcacacaaaaaaggctttagaatacttggaaaaggctaaactggaggatgatccggacacctgggttcaagtcgccgaagcatatattgacctaggtaacctgcttgacaatgaaagtgctgaacaagaagaagcttacaaaaccgccgaagaaatcttaggcaaagcaaacaaggcttctcatggtaaatttcaagatgtcctggacaatttcttacaaggctga

SEQ ID NO: 10238 - DNA, 1239 bp, Artificial Sequence
  Description of Artificial Sequence: Synthetic polynucleotide
atggctaaaagacccttaggtttaggtaaacaaagtagagaaaagaaaagaaaggtggaaagtgtcgaaaagaagagcgatgaaccttccagagaatccacacctgtgagaagtcaaatgagtgttgagcttgacgatgatgctgatttagatgacgaattagctcagttgaaaggattatggtctaaatattttcactctgacagagacgacgaatatgttttaaatggaatcgttcacgaatgtgacagattattgcgtctttctgaagaagataaagagattaagaagacgttgaacgatattttccatggtatatatgctttggctttatctgaattgactattttcaaggcaggcgatgaggaagccactgaagaaaagagaaaaaaagatgtatcctctttttttgaaagtgctatcgaaagagtcgaattaggtctttctcatttccctgaatcccaatttttgaaattggttttagcaaagataattttccaaaggattccgttggaatatatttccaatctccatttgaaatccaaggataaaaaacttgatcttgtaggacagcttgaacatggtaagaagcatttttctatttatgaaaacgatactgaatttacttttgaaatcttgcaaatggtgaatgacttattggacatcgtcgagaattttggtcgcgaacaatctattcaagagggcatagatagcgataatgaagaggaagaggaactcattgatattgagttggaaccagaacaccctgtatatcccttgcaacaatctttggaagcgaattacgagtggttgagaaaccattttgataaattgcttgacaacacaaatacagatgtgaaaatctatgcatctatagctaacaccttgggggaattatacttgaaaaaagctgaagaaccaagtaaagttttcttaagcttacagtacgatgatggcggttctgaaaaggttagcgacaaggaagccaagaacgcccaagaaaccgctttgaagcacacaaaaaaggctttagaatacttggaaaaggctaaattagaggatgatccggacacctgggttcaagtcgccgaagcatatattgacttgggtaacttacttgacaatgaaagtgctgaacaagaagaagcttacaaaaccgccgaagaaatcttaggcaaagcaaacaaggcttctcatggtaaatttcaagatgtcttggacaatttcttacaaggctga

SEQ ID NO: 10239 - DNA, 453 bp, Saccharomyces cerevisiae
atgtctgatataaacgaaatcgaaattccatccagaaaggatgaaattagacaagttactcccaaggatcccatgcatgagatcgaggataaaagcacataccacgctaagataaagaaatcagattccgggaccgtcctgggtgctataccgttgaattcaaggtcttctagtaactctagcgtgacatcgacgggtcagagcagtaggcgggtgactaagaaaacgaccaagaagaaaaagaagaatgcttgttatttcgatacctgttcaagtgcggcttcgaaattcatcggtgactgtaatttttgcaaaggtcacttttgctcgaaacacagattaatggaaaaccatgcttgtaatggcttaacgagctgcaaagaacagctacatcaaagaaacgctgataagctagaagctgaacaaactaaggctccaaagatacaaatttaa

SEQ ID NO: 10240 - DNA, 453 bp, Artificial Sequence
  Description of Artificial Sequence: Synthetic polynucleotide
atgtctgatataaacgaaatcgaaattccatccagaaaggatgaaattagacaagttactcccaaggatcccatgcatgagatcgaggataaaagcacataccacgctaagataaagaaatctgattccgggaccgtcttgggtgctataccgttgaattctaggtcttctagtaactctagcgtgacaagtacgggtcagagcagtaggagggtgactaagaaaacgaccaagaagaaaaagaagaatgcttgttatttcgatacctgtagtagtgcggcttccaaattcatcggtgactgtaatttttgcaaaggtcacttttgctccaaacacagattaatggaaaaccatgcttgtaatggcttaacgagctgcaaagaacagttacatcaaagaaacgctgataagttggaagctgaacaaactaaggctccaaagatacaaatttga

SEQ ID NO: 10241 - DNA, 2025 bp, Saccharomyces cerevisiae
atgacaaacaaatctagcctgaagaacaataggaaaggggttgcttcgaatactctctctggagctgagcaggccaatataggttcatcggcaatgcctgacacaaattctacgggaccattttcttccgtttctagtctggacactcctgtagtaaggaaatcaactagtcccactggttcacaaactaagtcaatcatgaatgctagcggaacttctggggcagttgtaagtaatacaccagagccagggttaaaaaggataccaactgttacattcagcgatccaaagttgggtagtctcaggtcggatgtggagcaaactccacctaaccaggtggccagacagtccagcgaaaagaaagcaacgtctgtacacatcgcagcggagggtgcaaatcaaggaagaaacttgaaagacataaatacaaaagtaccaaaagatggcgaggcttctgcttcttctttttcgactccaacctctattctctccaatgctgatatggggaataacatatccagcctgctggctaaaaagctaagtttcaccggtggaacagattctattttaaactctgacaatagttccgatagccccagaaaggagcacccacatttctacgtggaagatcctttacacaccccatcagttagatcaaggtctaacagtactagtcctcgcccctctgtggtagtgaatacatttaaccccatcaacattgaacgagagggctccatatcaaagactggagagcccacattgttggagtctgtcttggaagaagcaatgtctcccaatgcagtctcaaatcccttgaagagagaaaatattatgaccaatatggatccaaggcttccccaagatgacggcaagctacacgttctttttggggcaacaggttctttgtctgttttcaaactcaagcacatgatcagaaaattagaagaaatttacggaagggacaaaatatgcatacaagttatactaactaactcagcaaccaaattttttgcaatgaagtatatgaggaaaaataagaaacaacacaatagtatcgatacttctttcaacagcaccaattctaatgctggcaatataactggtaacaagaaaaaagtagcctctcttgaaaaatttagcattcagaagacgtcttcaaactcagcggcttctcagacaaataataaacaggaggaagaaaaacaaatggcctctactactggatttccttcgacacttggtggtagtcgtacgtacagcaactcttcaaacgttgtatcgcaacatcctcaaattgaactgccagcacatatacaattttggacagaccaagacgagtgggatgtatggcgacaacgaactgatcctgtattacacatagaactacgtcgttgggcagatatactagttgtcgcaccattaaccgcaaacacgttggccaagattgcccttggtttatgtgacaaccttttgacaagtgtaataagggcatggaatccaacgtttcccatattcctagcgccttcaatgggtagcggtacgttcaattccataatgactaaaaaacattttcgaattattcaagaagagatgccttgggtaactgtatttaaaccctcagaaaaagtcatgggcataaacggtgacatcgggttaagtgggatgatggatgcaaatgagattgttggcaagatagtcgtcaaactaggtggttatcccgatgtttctgcgggaaaggaagaagaagaggatgaagataacgatgaggaggatgataataagaagaacgatactggtggtaaagatgaagataatgacgacgacgacgatgacgatgatgatgatgacgatgatgacgacgacgacgacgacgacgacgacgacgacgacgacgatgatgatgatgacgacgatgatgacgacgatgatgacgacgacgacgacgacgatgaagatgacgaagacgaagatgaagacgatgaaggaaaaaagaaagaagataaaggagggctacagcgatcttaa

SEQ ID NO: 10242 - DNA, 2025 bp, Artificial Sequence
  Description of Artificial Sequence: Synthetic polynucleotide
atgacaaacaaatctagcttgaagaacaataggaaaggggttgcttctaatactctctctggagctgagcaggccaatataggttcttctgcaatgcctgacacaaattctacgggaccattttcttccgtttctagtttggacactcctgtagtaaggaaatctactagtcccactggttctcaaactaagtctatcatgaatgctagcggaacttctggggcagttgtaagtaatacaccagagccagggttaaaaaggataccaactgttacattcagcgatccaaagttgggtagtctcaggtctgatgtggagcaaactccacctaaccaggtggccagacagtccagcgaaaagaaagcaacgtctgtacacatcgcagcggagggtgcaaatcaaggaagaaacttgaaagacataaatacaaaagtaccaaaagatggcgaggcttctgcttcttctttttccactccaacctctattctctccaatgctgatatggggaataacatatccagcttattagctaaaaagttgagtttcaccggtggaacagattctattttaaactctgacaatagttccgatagccccagaaaggagcacccacatttctacgtggaagatcctttacacaccccatctgttagaagtaggtctaacagtactagtcctcgcccctctgtggtagtgaatacatttaaccccatcaacattgaaagagagggctccatatccaagactggagagcccacattgttggagtctgtcttggaagaagcaatgtctcccaatgcagtctccaatcccttgaagagagaaaatattatgaccaatatggatccaaggcttccccaagatgacggcaagttgcacgttctttttggggcaacaggttctttgtctgttttcaaactcaagcacatgatcagaaaattagaagaaatttacggaagggacaaaatatgcatacaagttatattgactaactctgcaaccaaattttttgcaatgaagtatatgaggaaaaataagaaacaacacaatagtatcgatacttctttcaacagcaccaattctaatgctggcaatataactggtaacaagaaaaaagtagcctctcttgaaaaatttagcattcagaagacgtcttccaactctgcggcttctcagacaaataataaacaggaggaagaaaaacaaatggcctctactactggatttccttctacacttggtggtagtcgtacgtacagcaactcttccaacgttgtatctcaacatcctcaaattgaattaccagcacatatacaattttggacagaccaagacgagtgggatgtatggagacaaagaactgatcctgtattacacatagaattgcgtcgttgggcagatatattagttgtcgcaccattaaccgcaaacacgttggccaagattgcccttggtttatgtgacaaccttttgacaagtgtaataagggcatggaatccaacgtttcccatattcttggcgccttctatgggtagcggtacgttcaattccataatgactaaaaaacattttagaattattcaagaagagatgccttgggtaactgtatttaaacccagtgaaaaagtcatgggcataaacggtgacatcgggttaagtgggatgatggatgcaaatgagattgttggcaagatagtcgtcaaattgggtggttatcccgatgtttctgcgggaaaggaagaagaagaggatgaagataacgatgaggaggatgataataagaagaacgatactggtggtaaagatgaagataatgacgacgacgacgatgacgatgatgatgatgacgatgatgacgacgacgacgacgacgacgacgacgacgacgacgacgatgatgatgatgacgacgatgatgacgacgatgatgacgacgacgacgacgacgatgaagatgacgaagacgaagatgaagacgatgaaggaaaaaagaaagaagataaaggagggttgcagagatcttga

SEQ ID NO: 10243 - DNA, 1380 bp, Saccharomyces cerevisiae
atgaccgaaaaccaaaccgcacatgtaagggcgttgatattggatgccaccccattaattacgcagtcctacacacattaccagaattatgcacagtctttttatactactcccacagtttttcaagaaattaaggatgctcaagcaaggaaaaaccttgaaatttggcagagcctcggaactttgaaattagtacatccaagtgaaaactcgatagccaaagtaagtacgttcgccaaattgaccggtgactactccgtactgagtgccaatgatttgcatattcttgctttgacatacgagttagaaattaaactaaataatggcgattggagactgaggaaaaaaccaggtgatgcattagatgcgtccaaggctgacgttggtacggacggcaaacagaagctcacagaagataataaaaaggaggaggactctgaaagtgttccaaaaaaaaagaacaagagaagaggtggaaaaaagcaaaaggcaaaaagagaagcaagagaagcaagagaagctgaaaatgcaaaccttgagctagagagtaaagctgaggaacatgttgaggaggctggatccaaagagcagatatgtaatgatgaaaatataaaggaatcttccgatttaaatgaagtattcgaggatgctgatgatgatggtgattggattacccccgagaacttaacagaagcaattattaaggatagtggtgaagataccactggttcattgggtgtagaagcgtccgaagaggatcgccatgtcgcattgaatcgaccagagaatcaggtggcattggcgactggcgattttgccgtccaaaatgtagcgttgcagatgaatctaaatctaatgaatttcatgtcaggtctgaaaatcaagcgaatccgtaattatatgctaagatgccacgcctgtttcaaaatatttcctctaccaaaagacggcaagccaaagcacttctgtgcctcatgcggtggacagggtaccttattaagatgcgcagtttccgttgactcacgcacggggaacgttacaccgcacttgaagtcgaacttccaatggaacaatagaggaaacagatattctgtagccagccccttatctaagaactcccaaaaaaggtacggcaaaaagggacacgtacattctaaaccacaggaaaatgtgattctcagagaagatcaaaaggagtacgaaaaggtgataaagcaagaagaatggacaagaagacacaacgagaagattctaaacaattggattggtggcggttctgcggataactatatttctccatttgcaattactgggttgaagcagcataacgtccgcattggtaagggaaggtacgtcaacagttccaaaaggagaagttag

SEQ ID NO: 10244 - DNA, 1380 bp, Artificial Sequence
  Description of Artificial Sequence: Synthetic polynucleotide
atgaccgaaaaccaaaccgcacatgtaagggcgttgatattggatgccaccccattaattacgcagtcctacacacattaccagaattatgcacagtctttttatactactcccacagtttttcaagaaattaaggatgctcaagcaaggaaaaaccttgaaatttggcagagcctcggaactttgaaattagtacatccaagtgaaaacagcatagccaaagtaagtacgttcgccaaattgaccggtgactactccgtattgagtgccaatgatttgcatattcttgctttgacatacgagttagaaattaaattgaataatggcgattggagattaaggaaaaaaccaggtgatgcattagatgcgtccaaggctgacgttggtacggacggcaaacagaagctcacagaagataataaaaaggaggaggactctgaaagtgttccaaaaaaaaagaacaagagaagaggtggaaaaaagcaaaaggcaaaaagagaagcaagagaagcaagagaagctgaaaatgcaaaccttgagttagagagtaaagctgaggaacatgttgaggaggctggatccaaagagcagatatgtaatgatgaaaatataaaggaatcttccgatttaaatgaagtattcgaggatgctgatgatgatggtgattggattacccccgagaacttaacagaagcaattattaaggatagtggtgaagataccactggttctttgggtgtagaagcgtccgaagaggatcgccatgtcgcattgaatagaccagagaatcaggtggcattggcgactggcgattttgccgtccaaaatgtagcgttgcagatgaatttgaatttaatgaatttcatgagtggtttgaaaatcaagagaatccgtaattatatgttgagatgccacgcctgtttcaaaatatttcctttaccaaaagacggcaagccaaagcacttctgtgccagttgcggtggacagggtaccttattaagatgcgcagtttccgttgacagccgcacggggaacgttacaccgcacttgaagtctaacttccaatggaacaatagaggaaacagatattctgtagccagccccttatctaagaactcccaaaaaaggtacggcaaaaagggacacgtacattctaaaccacaggaaaatgtgattctcagagaagatcaaaaggagtacgaaaaggtgataaagcaagaagaatggacaagaagacacaacgagaagattttgaacaattggattggtggcggttctgcggataactatatttctccatttgcaattactgggttgaagcagcataacgtccgcattggtaagggaaggtacgtcaacagttccaaaaggagaagttga

SEQ ID NO: 10245 - DNA, 1188 bp, Saccharomyces cerevisiae
atgcctgttgaaaaagatttaaaaactgcctacaaagctttgtatgatgagaaggaaccactgaaggccctccatctttatgatgaaattctcaaaggctcacccacaaatttaacggctctcatttttaaggcagcatgtcttgaaaagctatactttgggttttctgattggcacagcgatgcaactatggaaaacgcaaaggaacttcttgacaaggctctaatgacagctgagggtaggggcgatagatcgaagattggtcttgttaactttcgttattttgttcatttcttcaatatcaaagattatgaactggcccaatcttattttaaaaaagccaagaatcttggttacgttgatgacactttgcctttatgggaagatcgtctggagacaaaattgaataaaaaaaataaaaagcagaaggattcaactaataagcatacaattaaaccagtggaaagtattgaaaacagaggagataataattcttctcatagtcccatttcacctctcaaaattgaaaccgctcctcaagaatcccctaaatttaaaatcgattggtatcaatccagcacctctgtcactatatcattatttactgttaatcttcctgagtctaaggaacaagtcaatatatatatttctccaaacgatagaagaactttatcgatatcgtaccaagtaccgaaatctggatctgaatttcaatacaacgctaagctttcgcatgaggtggatccaaaagcagtgtcattaaaaattttcccaaaaaagctggaaattaccttgagcaaaattgatagcacgcaatggaagaagttggaagaagatattttaacggaatcctcaaggttatcagatgagggtaaaaattctgattctgcaacccgcttattatcagcagaaacggcatcaaaagagagattgtcttatccatcgtcctctaaaaaaaaaatagattggtctaaacttgacattgatgaagaagctgatgaagaagcgggatcggctgatagtttctttcaaaagctttacgctggagcggatccagataccaaaagggctatgatgaaatcctttatagaaagtaatggtactgcattgagtacagactgggaagacgtatctaagggaacggttaaaacttcaccaccagaaggcatggaacctaaacattggtaa

SEQ ID NO: 10246 - DNA, 1188 bp, Artificial Sequence
  Description of Artificial Sequence: Synthetic polynucleotide
atgcctgttgaaaaagatttaaaaactgcctacaaagctttgtatgatgagaaggaaccattgaaggccctccatctttatgatgaaattctcaaaggctcccccacaaatttaacggctctcatttttaaggcagcatgtcttgaaaagttgtactttgggttttctgattggcacagcgatgcaactatggaaaacgcaaaggaacttcttgacaaggctttgatgacagctgagggtaggggcgatagatccaagattggtcttgttaactttcgttattttgttcatttcttcaatatcaaagattatgaattggcccaatcttattttaaaaaagccaagaatcttggttacgttgatgacactttgcctttatgggaagatcgtttagagacaaaattgaataaaaaaaataaaaagcagaaggattctactaataagcatacaattaaaccagtggaaagtattgaaaacagaggagataataattcttctcatagtcccatttctcctctcaaaattgaaaccgctcctcaagaatcccctaaatttaaaatcgattggtatcaatccagcacctctgtcactatatctttatttactgttaatcttcctgagtctaaggaacaagtcaatatatatatttctccaaacgatagaagaactttatctatatcttaccaagtaccgaaatctggatctgaatttcaatacaacgctaagctttctcatgaggtggatccaaaagcagtgtctttaaaaattttcccaaaaaagttggaaattaccttgagcaaaattgatagcacgcaatggaagaagttggaagaagatattttaacggaatccagcaggttaagtgatgagggtaaaaattctgattctgcaacccgcttattaagtgcagaaacggcatccaaagagagattgtcttatccatcttcctctaaaaaaaaaatagattggtctaaacttgacattgatgaagaagctgatgaagaagcgggatctgctgatagtttctttcaaaagctttacgctggagcggatccagataccaaaagggctatgatgaaatcctttatagaaagtaatggtactgcattgagtacagactgggaagacgtatctaagggaacggttaaaacttctccaccagaaggcatggaacctaaacattggtga

SEQ ID NO: 10247 - DNA, 2658 bp, Saccharomyces cerevisiae
atggagacagcaacttcttcccctttgcccattaaatcgaggagaaacagcgaaaattctgggtctactacagttataccgcatatgaacccttctttagcaacaccgttgactgtgtcgaccatggtaaatcaatcaaattctaaagagtttatgaagttgaccccagttcgtattagagattttggttctcctttgaaaaacgtgtccactaattaccattttttagactcagaaaatggtaaaggtaacacaatggataatatgtatagagaaaatttcattcttatttcaaaggatctagagaaattactggagaatctcaatgtcatatatcaaaatattgggtattctaatacggaaattatcaccaaggagaaaatcatattcaccactatatctaattccataaaacaattttttgagcaagctgacgaagaattgaaaagactgtccgcagagaacggaattgaacaggatattctaaataacattctagagagaataaatgacccaagtggcataaagactattcctgacttatacattagaaatgctattctactgcaagaaagtaaaactgtgccacagtcaccgaaaaagccactttccttactaagcaaaaaagcagcattagatacagcaaaaaaatttgtcctaggaagttttttacccaggctccgcgactatttaaaatccttaatcactctaaaacacctcatacaatctgtaaaagaaaaccttcctggattgacagaagcagataacgaggctatcgccgagtttccagaattaagcacattaaccgcatatttgttacaaatagaaaatggtaaaggcgatattggtttgtccatgaaatttattatagataatagaaaagatattttaaagggatcggcatttaaaactattaacgaagaatctgtgaaacacatgaatgaagtcataaaaatttacgaggaagaatacgagaggaggtttaaaagcgtactcacaaaaaaggttagtatttcatcaatatgtgaacaacttggaactcccctagcaacgttaatcggtgaagattttgaacaagatctaagatcatatggagaagaggaaaactccacatcagaaataccaaatttccacccggtagacagagaaagaatgtctaaaattgatattacattggaaaaactgcaagctatccataaggaaagagcagacaaaaagaggctcctgatggaacaatgccaaaaactttggacaaggctaaaaatttctcaagaatacataaagacttttatgcgtaacaattcaagtttatcaaccgagtccttaggtagaatctctaaagaagttatgcgacttgaagcaatgaaaaaaaaactaataaaaaaacttatatcagattcctgggacaaaattcaggaattgtggcgtacgttacagtattcagaagaaagtcggtctaaattcatcattgtatttgaagaactaaggaacagtgcaacaactttacaggaagatgagcttcttctagaaacttgcgaaaatgagctaaaaagactagaagaaaaactgaccctttataagccaattttaaaattaatatcagattttgaatctttacaagaagatcaagaatttttggaaagaagttcaaaagactcttcacggcttttgtctagaaattctcataagatattactaactgaagaaaaaatgaggaaaaggataacaagacactttcctcgagtcatcaatgatttaagaattaaattagaagaggccgatggtctatttgatcaaccttttttgttcaaaggtaagccactttcagaagcaattgacattcagcaacaggaaatcgaagcaaaatatccaagatgtagagttagaatgcagagatctaaaaagggaaaatgtggtgcgaacaaagagaataaagtcataaaaaacactttcaaggccacagaaagttccatcagggtaccgattggtttgaatttaaatgatgccaacattacttataaaacgccttcaaagaaaacaatacaaggcttaacaaagaatgatctatcccaagagaactcgcttgctcgtcatatgcaaggaacaacgaagttatctagtccgaacagaagagcaacaagattactagcacccacagtaatatctaggaattccaaagggaatatagagagacctaccttaaacagaaacagatcatccgatctttcatcatcgcctaggataaatcatacgcatggcgaacatgcagtaaaaccacgccaattgtttcctatcccgctgaacaaagtcgacactaagggtagtcatatccctcaattaactaaagaaaaggctttagaacttcttaaaaggtcgactggcaccacgggtaaggagaatgtacgaagcccggaacgcaaaagctcattagaagattacgcacaaaaattgagcagtccttataaagaacctgagcacagcatatataaactttccatgtcgccagaaggtaaatttcaattaaacattcaacaaaaagatattgaaagcggatttgatgataccagtatgatggaagatgaaaatgataaggattttattacatggaaaaatgagcaagtttcgaaattgaatggattctcctttacagatatttga

SEQ ID NO: 10248 - DNA, 2658 bp, Artificial Sequence
  Description of Artificial Sequence: Synthetic polynucleotide
atggagacagcaacttcttcccctttgcccattaaatctaggagaaacagcgaaaattctgggtctactacagttataccgcatatgaacccttctttagcaacaccgttgactgtgtctaccatggtaaatcaaagcaattctaaagagtttatgaagttgaccccagttcgtattagagattttggttctcctttgaaaaacgtgtccactaattaccattttttagactctgaaaatggtaaaggtaacacaatggataatatgtatagagaaaatttcattcttatttccaaggatttagagaaattattggagaatctcaatgtcatatatcaaaatattgggtattctaatacggaaattatcaccaaggagaaaatcatattcaccactatatctaattccataaaacaattttttgagcaagctgacgaagaattgaaaagattatccgcagagaacggaattgaacaggatattttgaataacattttagagagaataaatgacccaagtggcataaagactattcctgacttatacattagaaatgctattttattacaagaaagtaaaactgtgccacagtctccgaaaaagccactttccttattaagcaaaaaagcagcattagatacagcaaaaaaatttgtccttggaagttttttacccaggctccgcgactatttaaaatccttaatcactttgaaacacctcatacaatctgtaaaagaaaaccttcctggattgacagaagcagataacgaggctatcgccgagtttccagaattaagcacattaaccgcatatttgttacaaatagaaaatggtaaaggcgatattggtttgtccatgaaatttattatagataatagaaaagatattttaaagggaagtgcatttaaaactattaacgaagaatctgtgaaacacatgaatgaagtcataaaaatttacgaggaagaatacgagaggaggtttaaaagcgtactcacaaaaaaggttagtatttcttctatatgtgaacaacttggaactcccttggcaacgttaatcggtgaagattttgaacaagatttgagatcttatggagaagaggaaaactccacaagtgaaataccaaatttccacccggtagacagagaaagaatgtctaaaattgatattacattggaaaaattacaagctatccataaggaaagagcagacaaaaagaggctcttaatggaacaatgccaaaaactttggacaaggttgaaaatttctcaagaatacataaagacttttatgcgtaacaatagtagtttatctaccgagtccttaggtagaatctctaaagaagttatgagacttgaagcaatgaaaaaaaaattgataaaaaaacttatatctgattcctgggacaaaattcaggaattgtggcgtacgttacagtattctgaagaaagtagatctaaattcatcattgtatttgaagaattgaggaacagtgcaacaactttacaggaagatgagcttcttttagaaacttgcgaaaatgagttgaaaagattagaagaaaaattgaccctttataagccaattttaaaattaatatctgattttgaatctttacaagaagatcaagaatttttggaaagaagttctaaagactcttcccgtcttttgtctagaaattctcataagatattattaactgaagaaaaaatgaggaaaaggataacaagacactttcctcgtgtcatcaatgatttaagaattaaattagaagaggccgatggtttatttgatcaaccttttttgttcaaaggtaagccactttctgaagcaattgacattcagcaacaggaaatcgaagcaaaatatccaagatgtagagttagaatgcagagatctaaaaagggaaaatgtggtgcgaacaaagagaataaagtcataaaaaacactttcaaggccacagaaagttccatcagggtaccgattggtttgaatttaaatgatgccaacattacttataaaacgccttctaagaaaacaatacaaggcttaacaaagaatgatttatcccaagagaactctcttgctcgtcatatgcaaggaacaacgaagttatctagtccgaacagaagagcaacaagattattggcacccacagtaatatctaggaattccaaagggaatatagagagacctaccttaaacagaaacagaagttccgatctttcttcttctcctaggataaatcatacgcatggcgaacatgcagtaaaaccacgccaattgtttcctatcccgttgaacaaagtcgacactaagggtagtcatatccctcaattaactaaagaaaaggctttagaacttcttaaaaggtctactggcaccacgggtaaggagaatgtaagaagcccggaacgcaaaagctctttagaagattacgcacaaaaattgagcagtccttataaagaacctgagcacagcatatataaactttccatgtctccagaaggtaaatttcaattaaacattcaacaaaaagatattgaaagcggatttgatgataccagtatgatggaagatgaaaatgataaggattttattacatggaaaaatgagcaagtttccaaattgaatggattctcctttacagatatttga

SEQ ID NO: 10249 - DNA, 1353 bp, Saccharomyces cerevisiae
atgacttcggataaacacctttttgtgctgattcacgggctatggggtaactatactcatatggaatctatgaggacaattttatccactacattaaaaaaggaagatgttaacgatgatatgatatattttttaccaaagcagaatgccatgtttaagacgtttgatggtatcgaaatcattgggtacaggacattgattgaagtttgtgaatttatccgagattataaagacgggaaaatcaccaaactaagcgtaatgggatattcgcaaggcggattagtggcccgatttatgatcggtaagatgttgaccgaatttaaagaactgttcgaggatattgaaccacaattattcattacaatggcaacgcctcatttgggggtagagttttacaatcctacgggcatagcatataaaagtgcgttatatagtgcgctgaggaccttgggatctactattttaggtaaaagcgggagagaaatgtttatcgcaaattctagtaacaatatattggtgaaattgagccagggtgagtaccttgaagcactctcgctatttaaatggaggatagcgtttgcgaatgtcaaaaatgaccgtacggtagccttctatacggcgtttattacggattgcgacccatttatagattttgacaacaaattgaaatatacattcgaagaaaagattccgggatctggctataaaggaatattgcctaagattgtcgacctaaacgctttaaacgttaacagccatgctcctactaaaccgaccaagacttataaaaagtggggacgcactattcttattatactagttgcaacattcttaattctcccaatagccctggttatgaatggcctgggaaccgcttatagttatattgttacttgcaagtaccgcaaaatgctctctaatggcattcttcacaatgaggtcagaggaaaattaggattgacggagcaactgaaaggctatgttacagatgcatacgggtccatcataaattcggctttagatatggatgcgaactatgaagcaagtaatagtaatcttgtaaacgaagaagagcttccttggaaggaatttatccaaaaatacacaactataaatgatggtgtttggaaatctaaatttaaaaaactgccttttgatgaaaaccgaaaggttattttgagaaatctaaacaaattgaaatggattagagttccaatatacataaaggctgtaaatgcgcatggcgtgattgtggcacgtagaggaatggacgagaatacagctgctactgggattgcttgtatcgaatttacggcccaattactagcatacttgatgcacaagagtaattga

SEQ ID NO: 10250 - DNA, 1353 bp, Artificial Sequence
  Description of Artificial Sequence: Synthetic polynucleotide
atgacttctgataaacacctttttgtgttgattcacgggttgtggggtaactatactcatatggaatctatgaggacaattttatccactacattaaaaaaggaagatgttaacgatgatatgatatattttttaccaaagcagaatgccatgtttaagacgtttgatggtatcgaaatcattgggtacaggacattgattgaagtttgtgaatttatcagagattataaagacgggaaaatcaccaaattaagcgtaatgggatattctcaaggcggattagtggccagatttatgatcggtaagatgttgaccgaatttaaagaattattcgaggatattgaaccacaattattcattacaatggcaacgcctcatttgggggtagagttttacaatcctacgggcatagcatataaaagtgcgttatatagtgcgttaaggaccttgggatctactattttaggtaaaagcgggagagaaatgtttatcgcaaattctagtaacaatatattggtgaaattgagccagggtgagtaccttgaagcactctccttatttaaatggaggatagcgtttgcgaatgtcaaaaatgaccgtacggtagccttctatacggcgtttattacggattgcgacccatttatagattttgacaacaaattgaaatatacattcgaagaaaagattccgggatctggctataaaggaatattgcctaagattgtcgacttgaacgctttaaacgttaacagccatgctcctactaaaccgaccaagacttataaaaagtggggacgcactattcttattatattagttgcaacattcttaattctcccaatagccttagttatgaatggcttgggaaccgcttatagttatattgttacttgcaagtaccgcaaaatgctctctaatggcattcttcacaatgaggtcagaggaaaattaggattgacggagcaattgaaaggctatgttacagatgcatacgggtccatcataaattctgctttagatatggatgcgaactatgaagcaagtaatagtaatcttgtaaacgaagaagagcttccttggaaggaatttatccaaaaatacacaactataaatgatggtgtttggaaatctaaatttaaaaaattaccttttgatgaaaacagaaaggttattttgagaaatttgaacaaattgaaatggattagagttccaatatacataaaggctgtaaatgcgcatggcgtgattgtggcacgtagaggaatggacgagaatacagctgctactgggattgcttgtatcgaatttacggcccaattattggcatacttgatgcacaagagtaattga

SEQ ID NO: 10251 - DNA, 774 bp, Saccharomyces cerevisiae
atgtcacggaaattatgcacactaaattttactcttagcggaaagcagggaagtttggtcattagggatatccaactttggagcaatcgacctacagcaagtaaatcaacttcagagttgaggggacaattcattcagtatgtagatctcgcaaaactgcctttgtgggtccgctccacaaatatgaatacatatagatgttatagtaccagtgcaaccgcacaggcttacttcaaatcaaaactaaggaacgcgaatcgtggcattgtcattgaattgtttgacaaggtcgatcagcgatcgcaggagccagcatacttgattatatttcgagagaacacagagttaaactgctttcaagtggatctaacaatgaagcatgagtttgatggccaggtcaccaaattgaagcaagatattggaaagacaagggcctccgtatcaaaggaaggtagtattgatataataatacaacaatctcaacaaaggaagatcggaacgaaaacggaagtgtatcgcaacgtgcatattaatgacaaacggcttcaattcaatgaaactttgtccaagctaattttgggtggcctccgacttcgaggtatttctaattctattacagactatcaaaagttatacaagataacgtttgatgcagctgaatttacgcacagggatgaattaaaacgcatttcgatgggatctggtgaagaggtttcgtttgaatcattgcaggaaactgtggaaactcttctgaagctctttaccaaatcatga

SEQ ID NO: 10252 - DNA, 774 bp, Artificial Sequence
  Description of Artificial Sequence: Synthetic polynucleotide
atgtctagaaaattatgcacattaaattttactcttagcggaaagcagggaagtttggtcattagggatatccaactttggagcaatagacctacagcaagtaaatctacttccgagttgaggggacaattcattcagtatgtagatctcgcaaaattacctttgtgggtccgctccacaaatatgaatacatatagatgttatagtaccagtgcaaccgcacaggcttacttcaaatctaaattgaggaacgcgaatcgtggcattgtcattgaattgtttgacaaggtcgatcagagaagccaggagccagcatacttgattatatttagagagaacacagagttaaactgctttcaagtggatttaacaatgaagcatgagtttgatggccaggtcaccaaattgaagcaagatattggaaagacaagggcctccgtatccaaggaaggtagtattgatataataatacaacaatctcaacaaaggaagatcggaacgaaaacggaagtgtatcgcaacgtgcatattaatgacaaaagacttcaattcaatgaaactttgtccaagttgattttgggtggcctcagacttcgtggtatttctaattctattacagactatcaaaagttatacaagataacgtttgatgcagctgaatttacgcacagggatgaattaaaacgcatttccatgggatctggtgaagaggtttcttttgaatctttgcaggaaactgtggaaactcttttgaagctctttaccaaaagttga

SEQ ID NO: 10253 - DNA, 1020 bp, Saccharomyces cerevisiae
atgccattacctccgtcaacattgaaccagaaatctaatagagtctactctgtagctagggtgtacaagaatgcctgcgaggagagaccacaagaatactgggactacgaacaaggggtgaccatcgattggggaaagatttccaattacgaaattatcaacaaaattggaagagggaaatattccgaagtgttcagcggtagatgtattgtaaacaaccagaagtgtgttattaaagttttaaaaccagttaaaatgaaaaaaatttatagagagttgaaaattctgaccaatctaacaggcggccccaatgttgttggcctttatgatatagtacaagacgctgactccaaaatacctgctttgatctttgaggaaatcaaaaatgttgatttcagaactttatatcctacattcaaacttcctgacatccagtattatttcacgcaattattgattgcgttagactactgtcactccatgggcataatgcacagagacgtaaagcctcagaatgtcatgattgatcctacggaacgtaaactaaggctgatcgattggggcctggcggagttctaccatccaggtgtagattacaacgttcgtgtcgcttcgcgttaccacaagggaccagaacttttagtaaacttgaaccaatatgactactccctagacttatggtcagtaggatgcatgctagcagctattgtcttcaaaaaagaaccttttttcaaagggtcgtctaatccagatcaactggtaaagattgccacagtactaggaaccaaggaactgttaggctatttgggtaagtacgggttgcacttaccatctgaatacgacaacattatgagagactttacaaaaaaatcgtggacacactttataacctccgagaccaaattagctgttcctgaagtggttgatttaatcgacaatttattaaggtatgaccatcaagaaagattaacagcaaaggaggctatggatcataagtttttcaaaacgaagtttgaataa

SEQ ID NO: 10254 - DNA, 1020 bp, Artificial Sequence
  Description of Artificial Sequence: Synthetic polynucleotide
atgccattacctccgtccacattgaaccagaaatctaatagagtctactctgtagctagggtgtacaagaatgcctgcgaggagagaccacaagaatactgggactacgaacaaggggtgaccatcgattggggaaagatttccaattacgaaattatcaacaaaattggaagagggaaatattccgaagtgttcagcggtagatgtattgtaaacaaccagaagtgtgttattaaagttttaaaaccagttaaaatgaaaaaaatttatagagagttgaaaattttgaccaatttgacaggcggccccaatgttgttggcctttatgatatagtacaagacgctgactccaaaatacctgctttgatctttgaggaaatcaaaaatgttgatttcagaactttatatcctacattcaaacttcctgacatccagtattatttcacgcaattattgattgcgttagactactgtcactccatgggcataatgcacagagacgtaaagcctcagaatgtcatgattgatcctacggaacgtaaattgaggttgatcgattggggcttggcggagttctaccatccaggtgtagattacaacgttcgtgtcgcttctcgttaccacaagggaccagaacttttagtaaacttgaaccaatatgactactccttggacttatggtctgtaggatgcatgttagcagctattgtcttcaaaaaagaaccttttttcaaagggagttctaatccagatcaattggtaaagattgccacagtattgggaaccaaggaattattaggctatttgggtaagtacgggttgcacttaccatctgaatacgacaacattatgagagactttacaaaaaaaagttggacacactttataacctccgagaccaaattagctgttcctgaagtggttgatttaatcgacaatttattaaggtatgaccatcaagaaagattaacagcaaaggaggctatggatcataagtttttcaaaacgaagtttgaatga

SEQ ID NO: 10255 - DNA, 807 bp, Saccharomyces cerevisiae
atgactagtttagatgacagtgtgctgacaaaaaaaaatatagcactattagacaacgccaccaactatattcgccccgccatagattattttcatttcaaatttaactatgatagcttggacgtgtccactacctggcgcttgttgctgaaaatgcgcaagcataaattattaaggttacccagttgctcttctgaaaatgagtttgactatagcatatatatggctaggttgtatcattgtatatggaggaggtggtccataaagcacttcaatttagatgaatacaaaattgatccactaagcataaactggaataaagaaatagacgttactgttctttacggacctgatctggttggaatacatgaaagagagcaacctactccaacggactttcctatggggaatataaaggaacaagggaagcaattattggatgtaagaaaggagggaagtgcttcttcattgctgaaaaaaggcagcgtattttactcaaaaggtaaatggctctctcagcgttcaatatcattcgatgacactgttcgtaggcgagatattgacaaacgtgggagatttcgtgaatcatgtgttctaataaatgatgtagaacaattccaaaactattccattgtctgggacgagagtagacatcgctaccgtcggcaggcacttccagacacgtacgattacgagcatctctatcccaatggcgacgaaactcctcggaacacgcctcacgacaatataataattcatcaaaacttgcatagcattacggaaggctcttatatctatataaagtga

SEQ ID NO: 10256 - DNA, 807 bp, Artificial Sequence
  Description of Artificial Sequence: Synthetic polynucleotide
atgactagtttagatgacagtgtgttaacaaaaaaaaatatagcattattagacaacgccaccaactatattcgccccgccatagattattttcatttcaaatttaactatgatagcttggacgtgtccactacctggcgcttgttgttgaaaatgcgcaagcataaattattaaggttacccagttgctcttctgaaaatgagtttgactatagcatatatatggctaggttgtatcattgtatatggaggaggtggtccataaagcacttcaatttagatgaatacaaaattgatccattaagcataaactggaataaagaaatagacgttactgttctttacggacctgatttggttggaatacatgaaagagagcaacctactccaacggactttcctatggggaatataaaggaacaagggaagcaattattggatgtaagaaaggagggaagtgcttcttctttgttgaaaaaaggcagcgtattttactctaaaggtaaatggctctctcagcgttctatatctttcgatgacactgttcgtaggagagatattgacaaacgtgggagatttcgtgaaagttgtgttttgataaatgatgtagaacaattccaaaactattccattgtctgggacgagagtagacatcgctaccgtcgtcaggcacttccagacacgtacgattacgagcatctctatcccaatggcgacgaaactcctagaaacacgcctcacgacaatataataattcatcaaaacttgcatagcattacggaaggctcttatatctatataaagtga

SEQ ID NO: 10257 - DNA, 1164 bp, Saccharomyces cerevisiae
atgtctcacagaaagtacgaagcaccacgtcacggtcatttaggtttcttgccaagaaagagagctgcctccatcagagctagagttaaggcttttccaaaggatgacagatccaagccagttgctctaacttccttcttgggttacaaggctggtatgaccaccattgtcagagatttggacagaccaggttctaagttccacaagcgtgaagttgtcgaagctgtcaccgttgttgacactccaccagttgtcgttgttggtgttgtcggttacgtcgaaaccccaagaggtttgagatctttgaccaccgtctgggctgaacatttgtctgacgaagtcaagagaagattctacaagaactggtacaagtctaagaagaaggctttcaccaaatactctgccaagtacgctcaagatggtgctggtattgaaagagaattggctagaatcaagaagtacgcttccgtcgtcagagttttggtccacactcaaatcagaaagactccattggctcaaaagaaggctcatttggctgaaatccaattgaacggtggttccatctctgaaaaggttgactgggctcgtgaacatttcgaaaagactgttgctgtcgacagcgtttttgaacaaaacgaaatgattgacgctattgctgtcaccaagggtcacggtttcgaaggtgttacccacagatggggtactaagaaattgccaagaaagactcacagaggtctaagaaaggttgcttgtattggtgcttggcatccagcccacgttatgtggagtgttgccagagctggtcaaagaggttaccattccagaacctccattaaccacaagatttacagagtcggtaagggtgatgatgaagctaacggtgctaccagcttcgacagaaccaagaagactattaccccaatgggtggtttcgtccactacggtgaaattaagaacgacttcatcatggttaaaggttgtatcccaggtaacagaaagagaattgttactttgagaaagtctttgtacaccaacacttctagaaaggctttggaagaagtcagcttgaagtggattgacactgcttctaagttcggtaagggtagattccaaaccccagctgaaaagcatgctttcatgggtactttgaagaaggacttgtaa

SEQ ID NO: 10258 - DNA, 1164 bp, Artificial Sequence
  Description of Artificial Sequence: Synthetic polynucleotide
atgtctcacagaaagtacgaagcaccacgtcacggtcatttaggtttcttgccaagaaagagagctgcctccatcagagctagagttaaggcttttccaaaggatgacagatccaagccagttgctttgacttccttcttgggttacaaggctggtatgaccaccattgtcagagatttggacagaccaggttctaagttccacaagcgtgaagttgtcgaagctgtcaccgttgttgacactccaccagttgtcgttgttggtgttgtcggttacgtcgaaaccccaagaggtttgagatctttgaccaccgtctgggctgaacatttgtctgacgaagtcaagagaagattctacaagaactggtacaagtctaagaagaaggctttcaccaaatactctgccaagtacgctcaagatggtgctggtattgaaagagaattggctagaatcaagaagtacgcttccgtcgtcagagttttggtccacactcaaatcagaaagactccattggctcaaaagaaggctcatttggctgaaatccaattgaacggtggttccatctctgaaaaggttgactgggctcgtgaacatttcgaaaagactgttgctgtcgacagcgtttttgaacaaaacgaaatgattgacgctattgctgtcaccaagggtcacggtttcgaaggtgttacccacagatggggtactaagaaattgccaagaaagactcacagaggtttaagaaaggttgcttgtattggtgcttggcatccagcccacgttatgtggagtgttgccagagctggtcaaagaggttaccattccagaacctccattaaccacaagatttacagagtcggtaagggtgatgatgaagctaacggtgctaccagcttcgacagaaccaagaagactattaccccaatgggtggtttcgtccactacggtgaaattaagaacgacttcatcatggttaaaggttgtatcccaggtaacagaaagagaattgttactttgagaaagtctttgtacaccaacacttctagaaaggctttggaagaagtcagcttgaagtggattgacactgcttctaagttcggtaagggtagattccaaaccccagctgaaaagcatgctttcatgggtactttgaagaaggacttgtga

SEQ ID NO: 10259 - DNA, 660 bp, Saccharomyces cerevisiae
atggaacatctcgccaacgaaaactcggattcggatatcaggtacagtttccttagcactttggatcatttaccatgtgaactaataagatctcttcgactgatgcaaacaatcgacttattcaagaatgaagaggatgagcctggtatggaaagggcctgtagggatctgttgctggtagcgacttatattaatgatctggtcgatgatcagattcatttcttaaagcagcataagaaggaactagagatacagaagtcagtgacaaaaaatttcaactcttcgctagagaatatcaagtcgaagttgacgttagaagaaccaggagcatataaggagccaaaactgcttttaaagattaacttgaaaaaggctaaatcgagggaaagaaaagagagcataactagccccacaattgggattaaccagggtgatgtaacagagggtaataataatcaagaggaggtttattgtttctgtaggaatgtatcttatgggccaatggtggcttgtgataatccggcttgtcccttcgagtggttccattatggttgcgtaggcctgaaacaagctcccaagggcaaatggtattgtagcaaagattgtaaggaaatagcaaaccagaggtccaagtcaaaacggcaaaaaagaagaaagtaa

SEQ ID NO: 10260 - DNA, 660 bp, Artificial Sequence
  Description of Artificial Sequence: Synthetic polynucleotide
atggaacatctcgccaacgaaaacagtgattctgatatcaggtacagtttccttagcactttggatcatttaccatgtgaattgataagatctcttagattaatgcaaacaatcgacttattcaagaatgaagaggatgagcctggtatggaaagggcctgtagggatttattgttagtagcgacttatattaatgatttggtcgatgatcagattcatttcttaaagcagcataagaaggaattagagatacagaagtctgtgacaaaaaatttcaactcttctttggagaatatcaagtccaagttgacgttagaagaaccaggagcatataaggagccaaaattacttttaaagattaacttgaaaaaggctaaatctagggaaagaaaagagagcataactagccccacaattgggattaaccagggtgatgtaacagagggtaataataatcaagaggaggtttattgtttctgtaggaatgtatcttatgggccaatggtggcttgtgataatccggcttgtcccttcgagtggttccattatggttgcgtaggcttgaaacaagctcccaagggcaaatggtattgtagcaaagattgtaaggaaatagcaaaccagaggtccaagagtaaaagacaaaaaagaagaaagtga

SEQ ID NO: 10261 - DNA, 930 bp, Saccharomyces cerevisiae
atgttttcaaatctatctaaacgttgggctcaaaggaccctctcgaaaagtttctactctaccgcaacaggtgctgctagtaaatctggcaagcttactcaaaagctcgttacagcgggtgttgctgccgccggtatcaccgcatcgactttactctatgcagactccttaactgccgaagctatgaccgcagctgaacacggattgcacgccccagcatatgcttggtcccacaatgggccttttgaaacatttgatcatgcatccattagaagaggttaccaggtttaccgtgaagtttgtgccgcctgccattctcttgacagagttgcttggagaactttggttggtgtttctcataccaacgaagaggttcgtaatatggccgaagaatttgaatacgatgacgaacctgatgaacaaggtaaccctaaaaagagaccaggtaagttgtccgattacatccctggcccatacccaaacgaacaggctgcaagagctgccaatcaaggtgccttgccacctgatctatctttgatcgtgaaagctagacacggtggttgtgactacattttctctttgttgaccggttatcctgatgaacctcctgctggtgtggctttaccaccaggttctaattataacccttacttcccaggtggttccattgcaatggcaagagtcttgtttgatgacatggttgagtacgaagatggtacccccgcaacgacatctcaaatggcaaaggacgttaccacctttttaaactggtgtgccgaacctgaacatgacgaaagaaagagattgggtttgaaaacggtgataatcttatcatctttgtatttgctatctatctgggtgaagaagttcaaatgggccggtatcaaaaccagaaaattcgttttcaatccaccaaaaccaagaaagtag

SEQ ID NO: 10262 - DNA, 930 bp, Artificial Sequence
  Description of Artificial Sequence: Synthetic polynucleotide
atgttttctaatttatctaaacgttgggctcaaaggaccctctctaaaagtttctactctaccgcaacaggtgctgctagtaaatctggcaagcttactcaaaagctcgttacagcgggtgttgctgccgccggtatcaccgcatctactttactctatgcagactccttaactgccgaagctatgaccgcagctgaacacggattgcacgccccagcatatgcttggtcccacaatgggccttttgaaacatttgatcatgcatccattagaagaggttaccaggtttaccgtgaagtttgtgccgcctgccattctcttgacagagttgcttggagaactttggttggtgtttctcataccaacgaagaggttcgtaatatggccgaagaatttgaatacgatgacgaacctgatgaacaaggtaaccctaaaaagagaccaggtaagttgtccgattacatccctggcccatacccaaacgaacaggctgcaagagctgccaatcaaggtgccttgccacctgatttatctttgatcgtgaaagctagacacggtggttgtgactacattttctctttgttgaccggttatcctgatgaacctcctgctggtgtggctttaccaccaggttctaattataacccttacttcccaggtggttccattgcaatggcaagagtcttgtttgatgacatggttgagtacgaagatggtacccccgcaacgacatctcaaatggcaaaggacgttaccacctttttaaactggtgtgccgaacctgaacatgacgaaagaaagagattgggtttgaaaacggtgataatcttatcttctttgtatttgttatctatctgggtgaagaagttcaaatgggccggtatcaaaaccagaaaattcgttttcaatccaccaaaaccaagaaagtga

SEQ ID NO: 10263 - DNA, 1890 bp, Saccharomyces cerevisiae
atggataaaagcatgatcaaaaaaagaggcaggcctcccatcaccaaagattatcccaatcccctacaaagccccatggcgcattcttcaatgcaggttcagaagcaggggcctcacagttttgccaaacctttgatgaaagtggggcaatctagtccatccccgaataaaagaagactcagcatcgatcatcatcataatttggcggcaactacgagaaagggcagatacaggggcgttcttctttctactcccaccaagaaatcgagcactaatggctctacgccgatctctaccccgtcttcgaatgacagctataataacacggtgttttctgaaacaaggaaaacctttcttcagagttcgccgcctatcatgacgtcttctccagctttccaaaagaaaaatgactacatgtttccttcacaggaacaattcaaactttctttaaccattaccgaaagtgggaaggccgttattgcaggatctttgcctttctctccatcgtcaaaatcgtctcatttaatgaacaataataataaaaagatcatgcaaaatgaaaaaattcacaaaggaagcaagaaaaatgcacccaagtttgagaagagacgtattctttctctcttaaaacagatgaagaatgagaaatattgtgatactgatacgctccccgaagcacctccagcgaaaccaagcagatctgacatcatcgacacagaattgccgactatcatagaaacttcagcttctccaataggcagtgctagaaacaataatatactgctttcgcaaccaccacaatcacccccttcaagcgcgcaacttaagcccccatccactccaaagagttctctacaattcaggatgggatttactcccaatgttgcactaaattccgtatcattaagtgatactatatccaaatctacaaatgctgtgggtgccagcaataataacaatcagaacggtaattccattagcaatatcgcggatgctaatactttacttaccttgactaatagcccgggagttttcttatcacctcgaaacaaaatgttgcccaagtcgactactgcatctaacgaacaacagcaggaattcgtgtttaagttttcaagtggtgacccgttattgcttactgacgacgcagatgggaattggccagaaatgctgttcaatgtatctaatacgcccagacgtcaaaaatgttttaacacacctccttcatggataaactttggttcacctggattattcagcccaccaagaagctctaatgtcatggtaaatggcaccactgtagccaccgcatcggatagcggcaacgtccatagacaattacaagctcaattggaggcgcaagtgcaagtgcaatcgcaatccaattctcctactcaaaggcaacaacaacagcgtcaatttcaaatacccccacctcacataaacatgaactcttccccgccacaaatcaatatcgcttccccacctcatcaatctatgtctcgggtgtcatctatttacttcaacaaagaaaaaaccacaacaggggtagcaaatatgctaggtaacaccaaaagcgaaaacttacagccgccggcgaatttatttaccgctgcccatggaccttcaactcctagaaatcaagaatttcaattacccactttgattgaatgcactccattaatccagcaaaccatgaatggctcattaggaaccaaatacataccaggtacttcaatttcgaacagtgcaactcctaatttacacgggttccctgttggaaccgggaaagctccctctagctttgacgattcactaaaacaaaacccgtacagcaacaaacaggatgatgctagaactgccttgaaaagattaatcgatgatcagtga

SEQ ID NO: 10264 - DNA, 1890 bp, Artificial Sequence
  Description of Artificial Sequence: Synthetic polynucleotide
atggataaaagcatgatcaaaaaaagaggcaggcctcccatcaccaaagattatcccaatcccttgcaaagccccatggcgcattcttctatgcaggttcagaagcaggggcctcacagttttgccaaacctttgatgaaagtggggcaatctagtccatccccgaataaaagaagactcagcatcgatcatcatcataatttggcggcaactacgagaaagggcagatacaggggcgttcttctttctactcccaccaagaaaagtagcactaatggctctacgccgatctctaccccgtcttccaatgacagctataataacacggtgttttctgaaacaaggaaaacctttcttcagagttctccgcctatcatgacgtcttctccagctttccaaaagaaaaatgactacatgtttccttctcaggaacaattcaaactttctttaaccattaccgaaagtgggaaggccgttattgcaggatctttgcctttctctccatcttctaaatcttctcatttaatgaacaataataataaaaagatcatgcaaaatgaaaaaattcacaaaggaagcaagaaaaatgcacccaagtttgagaagagacgtattctttctctcttaaaacagatgaagaatgagaaatattgtgatactgatacgctccccgaagcacctccagcgaaaccaagcagatctgacatcatcgacacagaattgccgactatcatagaaactagtgcttctccaataggcagtgctagaaacaataatatattactttctcaaccaccacaatctcccccttccagcgcgcaacttaagcccccatccactccaaagagttctttacaattcaggatgggatttactcccaatgttgcattgaattccgtatctttaagtgatactatatccaaatctacaaatgctgtgggtgccagcaataataacaatcagaacggtaattccattagcaatatcgcggatgctaatactttacttaccttgactaatagcccgggagttttcttatctcctagaaacaaaatgttgcccaagtctactactgcatctaacgaacaacagcaggaattcgtgtttaagttttctagtggtgacccgttattgcttactgacgacgcagatgggaattggccagaaatgcttttcaatgtatctaatacgcccagacgtcaaaaatgttttaacacacctccttcctggataaactttggttctcctggattattcagcccaccaagaagctctaatgtcatggtaaatggcaccactgtagccaccgcatctgatagcggcaacgtccatagacaattacaagctcaattggaggcgcaagtgcaagtgcaatctcaatccaattctcctactcaaaggcaacaacaacagcgtcaatttcaaatacccccacctcacataaacatgaactcttccccgccacaaatcaatatcgcttccccacctcatcaatctatgtctcgtgtgtcttctatttacttcaacaaagaaaaaaccacaacaggggtagcaaatatgttgggtaacaccaaaagcgaaaacttacagccgccggcgaatttatttaccgctgcccatggaccttccactcctagaaatcaagaatttcaattacccactttgattgaatgcactccattaatccagcaaaccatgaatggctctttaggaaccaaatacataccaggtacttctatttccaacagtgcaactcctaatttacacgggttccctgttggaaccgggaaagctccctctagctttgacgattctttgaaacaaaacccgtacagcaacaaacaggatgatgctagaactgccttgaaaagattaatcgatgatcagtga

SEQ ID NO: 10265 - DNA, 1734 bp, Saccharomyces cerevisiae
atgaaaggtgatcgttcgaggcaaaatatggctgtgacaaagaaggcaaagttaaaaaaaaatgacgagccaaaaaaggttttgaagactgccgcgaccgaaaaaggtgagggatccaagcgctactccttatggaatttctggataagcacattgtttttaaaattactattgattcctgactacttcagtacagattttgacgttcatagaaattggctggcaatcaccaataaattgcccatcagcgaatggtattatgagcacactagtcaatggacattggattatccgccattttttgcttattttgaatggtttttatcgcaatttgttcctaaatctgtacgtgatgacggttgtttggatatagtggagatcggaaagttcggtttgccaacaatcgttttccaacgactcactgtcatcttcagcgaaattcttctatttgtcatccttcaaatatacattaatactacaaagctaagtgaaagatctcaaagttttgtggttgcttctagcattgtactatcacccgggtttttaataatagatcacattcacttccaatataatggttttctttttgcgattctaataggctccattgtcgccgccaagaataagagatacatcttgtgcgctgttctgtatactacagccatatgtttcaagcatatatttttatatttggcgccatgttatttcgtgtttttattgagagcatacgttctcaatgtcaacaatttcaagtttaaaagttacaaagattttttgttcctgataagatgggcaaatcttttgaagttggctaccgttgttgttggaattttcactatttgtttccttccatttgctcatcaaatgccgcaagtgttgagcaggttattcccattctcaagaggactgacgcatgcatattgggcaccaaatttctgggcgttgtattcttttatggataaaatactcactacggtaatgttgaaattaccgtacgtccacacttttgctacaaaatttattaaacctcctctgatccctcagaatatcaaggaaattaatgaaaggctcgcggcaaacaacaatggaagtaaaggtctagttcaagacgtattttttgttattctccctcaaattcctccaaaattaacgtttattttgacgatattttaccaggtcttagcagtacttccacttttgtttgatccatcgttcaaaagatttgttggctcgttgactctctgtgggttggcatcgtttttgttcgggtggcatgtgcatgagaaagctataatgctagtcatcattccgttcacatttcttgttggatttgatcgtcgtcttttggtaccgtttatgttagttgcctcagctggttatgtttccttgtatcctcttctgtacaaaggccaagattttttcattaaaacattatacacttatgtttggtgtataatttattttgccgcttttagaaaaactacgaagatttcttcaagtgtagaaagaagaatctttttcttggataggttggcattaacgtacatcttttcattgttaccaatcgtcaccgtattacaaatattggatgaagtcaagtggagatattcatttttgcaaaaatttgaattcttaggattaatgatatatagtgtctattgttcattaggtataatcagctcgtggtttgccttatcgtggttatataattttgacgaattactatggcagtga

SEQ ID NO: 10266 - DNA, 1734 bp, Artificial Sequence
  Description of Artificial Sequence: Synthetic polynucleotide
atgaaaggtgatcgttctaggcaaaatatggctgtgacaaagaaggcaaagttaaaaaaaaatgacgagccaaaaaaggttttgaagactgccgcgaccgaaaaaggtgagggatccaagcgctactccttatggaatttctggataagcacattgtttttaaaattattattgattcctgactacttcagtacagattttgacgttcatagaaattggttggcaatcaccaataaattgcccatcagcgaatggtattatgagcacactagtcaatggacattggattatccgccattttttgcttattttgaatggtttttatctcaatttgttcctaaatctgtacgtgatgacggttgtttggatatagtggagatcggaaagttcggtttgccaacaatcgttttccaaagactcactgtcatcttcagcgaaattcttttatttgtcatccttcaaatatacattaatactacaaagttgagtgaaagatctcaaagttttgtggttgcttctagcattgtattatctcccgggtttttaataatagatcacattcacttccaatataatggttttctttttgcgattttaataggctccattgtcgccgccaagaataagagatacatcttgtgcgctgttttatatactacagccatatgtttcaagcatatatttttatatttggcgccatgttatttcgtgtttttattgagagcatacgttctcaatgtcaacaatttcaagtttaaaagttacaaagattttttgttcttgataagatgggcaaatcttttgaagttggctaccgttgttgttggaattttcactatttgtttccttccatttgctcatcaaatgccgcaagtgttgagcaggttattcccattcagtagaggattaacgcatgcatattgggcaccaaatttctgggcgttgtattcttttatggataaaatactcactacggtaatgttgaaattaccgtacgtccacacttttgctacaaaatttattaaacctcctttgatccctcagaatatcaaggaaattaatgaaaggctcgcggcaaacaacaatggaagtaaaggtttagttcaagacgtattttttgttattctccctcaaattcctccaaaattaacgtttattttgacgatattttaccaggtcttagcagtacttccacttttgtttgatccatctttcaaaagatttgttggctctttgactctctgtgggttggcaagttttttgttcgggtggcatgtgcatgagaaagctataatgcttgtcatcattccgttcacatttcttgttggatttgatcgtcgtcttttggtaccgtttatgttagttgcctctgctggttatgtttccttgtatcctcttttatacaaaggccaagattttttcattaaaacattatacacttatgtttggtgtataatttattttgccgcttttagaaaaactacgaagatttcttccagtgtagaaagaagaatctttttcttggataggttggcattaacgtacatcttttctttgttaccaatcgtcaccgtattacaaatattggatgaagtcaagtggagatattcttttttgcaaaaatttgaattcttaggattaatgatatatagtgtctattgttctttaggtataatcagctcctggtttgccttatcttggttatataattttgacgaattattatggcagtga

SEQ ID NO: 10267 - DNA, 2028 bp, Saccharomyces cerevisiae
atggactacgaggataatctagaagcacctgtttgggacgaactaaatcatgagggagataaaactcagagcctcgtttcaaattcaattgaatcaattggtcaaatatctacaaatgaagaaagaaaagacaatgagcttttagagaccacagcttcatttgcggacaagatagacttggatagtgcgccagaatggaaagaccctggtttgtcggtggctggtaatccgcaactagaggagcatgacaattccaaagctgacgatcttattaattctttagcccctgaacaggatccgattgctgatctcaagaatagcactacacaatttattgcaacaagagaatccggtggcgcattgttcactggaaacgccaactctcccttagtttttgacgatacgatatacgatgctaacacttcaccaaatacttcaaaaagcatctctggaagaagatccggcaaaccacgaattctgtttgattccgccagagctcaaagaaactccaaacgcaaccattctctgaaagcgaagagaacaactgcttccgatgataccatcaaaacaccctttactgatcccttaaagaaagctgaaaaagagaatgaatttgttgaagagccattggacgataggaatgaaaggagagaaaacaatgagggcaagttcacagcttctgttgaaaaaaatatccttgagcaagtggacaggcctttatacaatcttcctcagacaggtgctaatatttcaagtcctgctgaggtcgaggaaaactcagaaaagtttggaaaaaccaagattggctcaaaggtgccaccaaccgaaaaggctgtggctttcaaagttgaagttaaagacccggtcaaagtaggagagctaacatccattcatgtggagtatactgtaatcagtgaatcatcattacttgagctaaaatatgcacaggtaagcaggcgttacagagatttcaggtggctatatcgtcaattgcagaacaaccattggggtaaagtaataccaccaccaccagagaagcaatcagtaggcagttttaaggaaaatttcattgaaaatagaagatttcaaatggaaagcatgttaaaaaaaatatgtcaagatccggttctacaaaaggacaaagattttctactctttttgacaagtgatgactttagttcagagtctaaaaaaagggcatttttgactggatctggcgctattaatgatagcaacgatctgtcagaagtccggataagtgagatacaactactaggtgcagaggatgctgccgaggtcttaaaaaatgggggtatcgacgcggaatcgcacaagggatttatgagtatatcgttttcatcactgcccaagtacaacgaggcagatgaattctttatcgaaaagaaacaaaagattgatgaactggaagataatttaaaaaaattgagcaaatctttggaaatggtcgacacctcaagaaacaccctggctgcatcaacagaagaattctctagtatggtagaaaccctagcgtctttgaacgtgagtgaacctaattcggaactgctgaataattttgctgatgttcataaaagcataaaaagctctcttgagagaagctctttgcaagagactttgacgatgggtgtgatgctggacgactatattaggtcattggcaagcgtaaaagcaattttcaatcagagatccaaattggggtatttcttggtagtaatagaaaatgacatgaataagaaacactcacaattgggcaaattgggtcaaaatattcattcagaaaaattcagagaaatgagaaaggaatttcaaacattggagagaaggtataaccttacaaaaaaacaatggcaagcggtaggagataaaataaaagatgaattccaaggtttctctactgataaaattcgggaattccgaaacggcatggaaatatcactagaagcggccattgaatctcaaaaagaatgcatcgagctttgggagacattctaccaaaccaatctttag

SEQ ID NO: 10268 - DNA, 2028 bp, Artificial Sequence
  Description of Artificial Sequence: Synthetic polynucleotide
atggactacgaggataatttggaagcacctgtttgggacgaattgaatcatgagggagataaaactcagagcctcgtttctaattctattgaaagtattggtcaaatatctacaaatgaagaaagaaaagacaatgagcttttagagaccacagcttcttttgcggacaagatagacttggatagtgcgccagaatggaaagaccctggtttgtctgtggctggtaatccgcaattggaggagcatgacaattccaaagctgacgatcttattaattctttagcccctgaacaggatccgattgctgatctcaagaatagcactacacaatttattgcaacaagagaatccggtggcgcattgttcactggaaacgccaactctcccttagtttttgacgatacgatatacgatgctaacacttctccaaatacttctaaaagcatctctggaagaagatccggcaaaccaagaattttatttgattccgccagagctcaaagaaactccaaacgcaaccattctttgaaagcgaagagaacaactgcttccgatgataccatcaaaacaccctttactgatcccttaaagaaagctgaaaaagagaatgaatttgttgaagagccattggacgataggaatgaaaggagagaaaacaatgagggcaagttcacagcttctgttgaaaaaaatatccttgagcaagtggacaggcctttatacaatcttcctcagacaggtgctaatatttccagtcctgctgaggtcgaggaaaactctgaaaagtttggaaaaaccaagattggctccaaggtgccaccaaccgaaaaggctgtggctttcaaagttgaagttaaagacccggtcaaagtaggagagttgacatccattcatgtggagtatactgtaatcagtgaatcttctttacttgagttgaaatatgcacaggtaagcaggcgttacagagatttcaggtggttatatcgtcaattgcagaacaaccattggggtaaagtaataccaccaccaccagagaagcaaagtgtaggcagttttaaggaaaatttcattgaaaatagaagatttcaaatggaaagcatgttaaaaaaaatatgtcaagatccggttttgcaaaaggacaaagattttttactctttttgacaagtgatgactttagtagtgagtctaaaaaaagggcatttttgactggatctggcgctattaatgatagcaacgatttatctgaagtcagaataagtgagatacaattattgggtgcagaggatgctgccgaggtcttaaaaaatgggggtatcgacgcggaatctcacaagggatttatgagtatatccttttcttctttacccaagtacaacgaggcagatgaattctttatcgaaaagaaacaaaagattgatgaattggaagataatttaaaaaaattgagcaaatctttggaaatggtcgacacctccagaaacaccttggctgcaagcacagaagaattctctagtatggtagaaaccttagcgtctttgaacgtgagtgaacctaattctgaattattgaataattttgctgatgttcataaaagcataaaaagctctcttgagagaagctctttgcaagagactttgacgatgggtgtgatgttggacgactatattaggtctttggcaagcgtaaaagcaattttcaatcagagatccaaattggggtatttcttggtagtaatagaaaatgacatgaataagaaacactctcaattgggcaaattgggtcaaaatattcattctgaaaaattcagagaaatgagaaaggaatttcaaacattggagagaaggtataaccttacaaaaaaacaatggcaagcggtaggagataaaataaaagatgaattccaaggtttctctactgataaaattagagaattcagaaacggcatggaaatatctttggaagcggccattgaatctcaaaaagaatgcatcgagctttgggagacattctaccaaaccaatctttga

SEQ ID NO: 10269 - DNA, 345 bp, Saccharomyces cerevisiae
atgctttttgaagtatttggtgaagtgttagcatcgtatatcgtatcgtcaaaaactaagggagagttggcgtttccagtgaacaatgcgccaccggattctcttgttgcaataaattgtgtagtgctattcttgagatcagcaatcggatcctgttcaggggctaaagaattaataagatcgtcagctttggaattgtcatgctcctctagttgcggattaccagccaccgacaaaccagggtctttccattctggcgcactatccaagtctatcttgtccgcaaatgaagctgtggtctctaaaagctcattgtcttttctttcttcatttgtagatatttga

SEQ ID NO: 10270 - DNA, 345 bp, Artificial Sequence
  Description of Artificial Sequence: Synthetic polynucleotide
atgctttttgaagtatttggtgaagtgttagcaagttatatcgtatcttctaaaactaagggagagttggcgtttccagtgaacaatgcgccaccggattctcttgttgcaataaattgtgtagtgcttttcttgagaagtgcaatcggatcctgttctggggctaaagaattaataagaagttctgctttggaattgtcttgctcctctagttgcggattaccagccaccgacaaaccagggtctttccattctggcgcattgtccaagtctatcttgtccgcaaatgaagctgtggtctctaaaagctctttgtcttttctttcttcttttgtagatatttga

SEQ ID NO: 10271 - DNA, 1914 bp, Saccharomyces cerevisiae
atgggtgtgagatccgctgcaaaggaaatgcacgaacgggaccataattcggacagttccagtttagtaacttccctgatgaaatcttggaggatatcgtcggcttcttcctccaagaagccatcgttatacaaaatgaatactactgaatctactagtttaccctcgggttatgcttcctcggcagatagagatcggagaaccagtgacggtaattttgaagctatggcaaagcaacaagcaagcactagacgtacctcgaattcctattcacctctacgatatgtaaaccccactctaagcactgcaagtaacgaaagtccccggcctgctttactcttacgtcagcatcaccagcgtcatcaccaccatcaacaaccccgccatagcagtagtggtagtgtaggcaacaattgcagtaacagtacagagcctaacaaaaagggtgatcgatatttcaaagacttagatgaggattggagtgctgttattgacgattataatatgcctattcctatacttactaacggtggatttggtacacctgtagctccaacgagaactttgtcgcgaaaatccacttcttcttccatcaattcgatttcgaatatggggacctccgcagtacggaattcttcctcctcttttacataccctcaattaccacagctgcaaaaagagaaaacaaatgattccaagaaaactcagttggaaatcgaaaacgaacgggatgttcaagaattaaactccatcatccagcgcatttctaaatttgacaatattttgaaagataagacaatcataaatcaacaggatctgcgccagatcagttggaatggtatcccaaaaatacacaggcctgttgtttggaaattattaataggttatttgcctgtgaacaccaagagacaggagggtttcttacaaaggaagaggaaagaatatagggatagtctgaaacataccttttctgaccagcactcaagagatatcccaacttggcatcagatagagatagatataccgagaacaaatccccacattcccctctaccagttcaaatccgtacagaacagtttacaacgaatactatatctttgggcaatcaggcatcctgctagcggatatgtgcaaggtattaatgatttagttacaccatttttcgagacttttcttaccgaatatctgccgccttcacaaatagatgatgtagagataaaggacccctctacttatatggtagatgaacagattacagatttagaagcggacacgttttggtgtcttaccaaattgctcgaacaaattaccgataactatattcacggacaaccaggcatattaagacaagtgaagaatttgagtcagctagtgaaacgaattgatgctgatctatataaccattttcaaaatgaacatgtggagtttatacagtttgcattcagatggatgaattgccttttgatgagagaatttcaaatgggtacagtaataaggatgtgggacacatatttatctgaaacttcacaagaggtcacttcttcttattctatgtcgtccaatgacattaaacctcctgttactccaacagaacctcgagtggcaagttttgttacaccaacaaaagatttccaatctcccaccacagctctttctaatatgacaccaaacaatgctgttgaagacagtggaaaaatgagacagtcttcgttgaatgagtttcatgtgtttgtttgtgctgcattcctcatcaagtggagtgaccagctaatggaaatggatttccaagaaactataactttcttacagaaccctcctacaaaggactggactgaaacggatattgaaatgcttctgagcgaagcctttatttggcaatctctttacaaagatgctacgtcgcactggctgtaa

SEQ ID NO: 10272 - DNA, 1914 bp, Artificial Sequence
  Description of Artificial Sequence: Synthetic polynucleotide
atgggtgtgagatccgctgcaaaggaaatgcacgaaagagaccataatagtgacagttccagtttagtaacttccttgatgaaatcttggaggatatcttctgcttcttcctccaagaagccatctttatacaaaatgaatactactgaatctactagtttaccctctggttatgcttcctctgcagatagagatagaagaaccagtgacggtaattttgaagctatggcaaagcaacaagcaagcactagacgtacctctaattcctattctcctttgagatatgtaaaccccactttaagcactgcaagtaacgaaagtcccagacctgctttactcttacgtcagcatcaccagcgtcatcaccaccatcaacaaccccgccatagcagtagtggtagtgtaggcaacaattgcagtaacagtacagagcctaacaaaaagggtgatagatatttcaaagacttagatgaggattggagtgctgttattgacgattataatatgcctattcctatacttactaacggtggatttggtacacctgtagctccaacgagaactttgagcagaaaatccacttcttcttccatcaattctatttctaatatggggacctccgcagtaagaaattcttcctcctcttttacataccctcaattaccacagttacaaaaagagaaaacaaatgattccaagaaaactcagttggaaatcgaaaacgaaagagatgttcaagaattaaactccatcatccagcgcatttctaaatttgacaatattttgaaagataagacaatcataaatcaacaggatttacgccagatcagttggaatggtatcccaaaaatacacaggcctgttgtttggaaattattaataggttatttgcctgtgaacaccaagagacaggagggtttcttacaaaggaagaggaaagaatatagggatagtttgaaacataccttttctgaccagcactccagagatatcccaacttggcatcagatagagatagatataccgagaacaaatccccacattcccctctaccagttcaaatccgtacagaacagtttacaaagaatactttatctttgggcaatcaggcatcctgctagcggatatgtgcaaggtattaatgatttagttacaccatttttcgagacttttcttaccgaatatttaccgccttctcaaatagatgatgtagagataaaggacccctctacttatatggtagatgaacagattacagatttagaagcggacacgttttggtgtcttaccaaattgctcgaacaaattaccgataactatattcacggacaaccaggcatattaagacaagtgaagaatttgagtcagttggtgaaaagaattgatgctgatttatataaccattttcaaaatgaacatgtggagtttatacagtttgcattcagatggatgaattgccttttgatgagagaatttcaaatgggtacagtaataaggatgtgggacacatatttatctgaaacttctcaagaggtcacttcttcttattctatgtcttccaatgacattaaacctcctgttactccaacagaacctagagtggcaagttttgttacaccaacaaaagatttccaatctcccaccacagctctttctaatatgacaccaaacaatgctgttgaagacagtggaaaaatgagacagtcttctttgaatgagtttcatgtgtttgtttgtgctgcattcctcatcaagtggagtgaccagttgatggaaatggatttccaagaaactataactttcttacagaaccctcctacaaaggactggactgaaacggatattgaaatgcttttgagcgaagcctttatttggcaatctctttacaaagatgctacgagccactggttgtga

SEQ ID NO: 10273 - DNA, 1797 bp, Saccharomyces cerevisiae
atgagcttcagtagtatagtctctaagtttttgagatatttagaaattcctgccaaaaataggactgccgtgaattttctgaggaaccctgatttgcaacctatcaagtctgcaaatcaaacatgggggttctggtctaatttggcgtactggggcgctgtgtcctttacagcaggtacatggatgagtggttctgctgcactaagtgtcggcctaagttacccagagaccattgtttcgtttcttctcggtaatgtcttgaccattattttcactatggccaactcttaccccggttatgattggaaaatcggtttcaccttggcccaaagattcgtttttggcatttacggttcagccttcggtatcatcattagaattttgatgagtattgtcaattatggttccaacgcttggttgggtggtctatctatcaacatgatattagattcctggtcccaccactatctgcacctgcccaatactttgtccccaagtgttgccatgaccaccaagcagttggtcggcttcattattttccacgtcctcaccgcgctctgctatttcatgaaaccctaccatatgaactaccttttaatttggtcatgtgtagctacttgctttgccatgctgggtatagtgatttacttgactaagaatgcccatggtgtcggtgaattgtttacctccacaaaatctaccgttactggttctaaaagagcatgggcttgggtttacatgatttcatactggttcggttccatttctccaggttccaccaaccaaagtgactattcaagattcggttcctccaatttggctatctggaccggtagcgtctgtgcattactaatcccagcaaccttggtcccaatcttcggtgtcattagtgcctccacctgcgacaaattatacggtaaacaattttggatgcccatggatatattcgattattggttgacaaacaactattctgcaggcgctcgcgcaggtgccttcttctgtggtctttgctttaccatgtctcaaatgtcctccaccatctccaactgtgggtttgccactggtatggatatggccggtttgttgcccaaatacgtcgatatcaagagaggtgctcttttttgcgcatgtatctcctgggcttgtttgccatggaacttctacaactcttcttctactttcttaactgtcatgagttctttcggtgttgtcatgactcctattattgctgtcatgatctgtgataactttctgatcaggaagaggcaatattccattactaatgcctttattctaaagggtgaatactattttaccaagggtgtcaactggagagctatcgttgcctgggtgtgtggtatggctcccggtctacctggtatcgcttgggaagtcaacaataactatttccacgactcaggtattgttaaattcttttatggtgattctttcttctcctttttgatttcttttttcgtttactgggggctatgtgtcttcttcccattcaaaattactgttagacatgatgacaaagattactatggtgcatttaccgacgaagaagcgagaaagaagggcatgattccatacagtgaaatttctgaggaagaaatccgtgcttacacgttaggcgaatgctacacaactggacacgaatacaaacctgagagttctgataacgaatcacctgaattgatcaaaactagctcagaaaacactaacgtatttgaaatcgttcaccaaaaggatgatgaaaagcactcctttagtaccactcaacaagttgtctga

SEQ ID NO: 10274 - DNA, 1797 bp, Artificial Sequence
  Description of Artificial Sequence: Synthetic polynucleotide
atgagcttcagtagtatagtctctaagtttttgagatatttagaaattcctgccaaaaataggactgccgtgaattttttaaggaaccctgatttgcaacctatcaagtctgcaaatcaaacatgggggttctggtctaatttggcgtactggggcgctgtgtcctttacagcaggtacatggatgagtggttctgctgcattaagtgtcggcttaagttacccagagaccattgtttcttttcttctcggtaatgtcttgaccattattttcactatggccaactcttaccccggttatgattggaaaatcggtttcaccttggcccaaagattcgtttttggcatttacggttctgccttcggtatcatcattagaattttgatgagtattgtcaattatggttccaacgcttggttgggtggtctttctatcaacatgatattagattcctggtcccaccactatttgcacttacccaatactttgtccccaagtgttgccatgaccaccaagcagttggtcggcttcattattttccacgtcctcaccgcgctctgctatttcatgaaaccctaccatatgaactaccttttaatttggtcttgtgtagctacttgctttgccatgttgggtatagtgatttacttgactaagaatgcccatggtgtcggtgaattgtttacctccacaaaatctaccgttactggttctaaaagagcatgggcttgggtttacatgatttcttactggttcggttccatttctccaggttccaccaaccaaagtgactattctagattcggttcctccaatttggctatctggaccggtagcgtctgtgcattattgatcccagcaaccttggtcccaatcttcggtgtcattagtgcctccacctgcgacaaattatacggtaaacaattttggatgcccatggatatattcgattattggttgacaaacaactattctgcaggcgctcgcgcaggtgccttcttctgtggtctttgctttaccatgtctcaaatgtcctccaccatctccaactgtgggtttgccactggtatggatatggccggtttgttgcccaaatacgtcgatatcaagagaggtgctcttttttgcgcatgtatctcctgggcttgtttgccatggaacttctacaactcttcttctactttcttaactgtcatgagttctttcggtgttgtcatgactcctattattgctgtcatgatctgtgataactttttgatcaggaagaggcaatattccattactaatgcctttattttgaagggtgaatactattttaccaagggtgtcaactggagagctatcgttgcctgggtgtgtggtatggctcccggtttgcctggtatcgcttgggaagtcaacaataactatttccacgactctggtattgttaaattcttttatggtgattctttcttctcctttttgatttcttttttcgtttactgggggctttgtgtcttcttcccattcaaaattactgttagacatgatgacaaagattactatggtgcatttaccgacgaagaagcgagaaagaagggcatgattccatacagtgaaatttctgaggaagaaatccgtgcttacacgttaggcgaatgctacacaactggacacgaatacaaacctgagagttctgataacgaatctcctgaattgatcaaaactagctctgaaaacactaacgtatttgaaatcgttcaccaaaaggatgatgaaaagcactcctttagtaccactcaacaagttgtctga

SEQ ID NO: 10275 - DNA, 315 bp, Saccharomyces cerevisiae
atgctgacgaaagttgtgttcctctttttttggagcaggtctgactcaactaaaaagctagctgcatgcaaccacgctacattggcacactatatcctgacgcccgcgctatactctgacgcctgcgctatatattctgacgtctactccataactattatagtagtggccactgttgttcgtaacccggcgcggtgttcgctccgagcacgaaaattctgtcgtttattctcttccttcttccagttccattacttaaaggagctgttttatttcattcgaaagcccgatgacaaattctcctctttcatataa

SEQ ID NO: 10276 - DNA, 315 bp, Artificial Sequence
  Description of Artificial Sequence: Synthetic polynucleotide
atgcttacgaaagttgtgttcctctttttttggagcaggtctgactctactaaaaagttggctgcatgcaaccacgctacattggcacactatatcttaacgcccgcgttgtactctgacgcctgcgctatatattctgacgtctactccataactattatagtagtggccactgttgttcgtaacccggcgagatgttctctcagagcaagaaaattctgtcgtttattctcttccttcttccagttccattacttaaaggagttattttatttcattagaaagcccgatgacaaattctcctctttcatatga

SEQ ID NO: 10277 - DNA, 162 bp, Saccharomyces cerevisiae
atgattctcgctttgggcgacttcctgactaacaggaagacaaagcatgcgagaggccctgggttcaattcccagctcgccccttttatttttgattatttatttcctattggtcgggtaacagattttttttatttttttcaaggcccttttgttttgtaa

SEQ ID NO: 10278 - DNA, 162 bp, Artificial Sequence
  Description of Artificial Sequence: Synthetic polynucleotide
atgattctcgctttgggcgacttcttgactaacaggaagacaaagcatgcgagaggccctgggttcaattcccagctcgccccttttatttttgattatttatttcctattggtagagtaacagattttttttatttttttcaaggcccttttgttttgtga

SEQ ID NO: 10279 - DNA, 1773 bp, Saccharomyces cerevisiae
atgccgaagagaaaaattgctcctaacaaggaaagcagcaggcgtacggtctcccacgatgatttaaccccacaaatacaagaatttcaaaacctaatggatctcgaatcgcaaaaagtggaaaacatcagacagtcgtattcgaggcaaaactccctgctggccaaggataactccatattaaaaattaaagttaatagcttggaaaaaaaaataagccagctggtacaagaaaacgtgactctacgatctaaaacctctataagcgaagctatctacagggaacggttaagtaatcaactacaagtcattgaaaacggtattattcaaagatttgacgaaattttttatatgtttgagaacgtacgtaaaaacgaaaatttgcccagttcgagcttaagaacaatgttgaagagaacgagttccaggtcaagatcatgctcattgtcatcacccacatactcaaaaagttacactaggttatcaaatcacgagaataacctgtcgcatgaatcaagttttaacaaggacgatggtccagatcttgagcctaaggctaaaaaaaggaagagttctaggcggcaatctatgtttgtatccacgagtttagaacctgaagacgaaaccggtgaaaacgaacccatgatggaaaattcctctgtagaggtaccggcagaatcacacgagtctgcgcaagtggaggaaacaatagatgccttaaaccctgaagaggaaaatagcgattctgtcagtaattttaccaattcaattatagaatactccataccagaggagaatccgacagaacccgagcattcatcttctaaactagaaatattcaatgacagtacaaatatgctaagtacagtgccgtcaaatcctttgccgttgcctttaccaggcccatccgcaactttacctactaccactagcgatgcttcaacggtctatccttcatcaagttcttctactaattctcatccaaagaccaaaattaagcattccatgaagccgcctaggatagaactgaagaaaaaggttattgacgaagtcatgcccgtaagtaacatgagcagcaacagcgaaatatcatttacgagaactagaagaactcgtggtaaagctgtagattacactttgccttctttaagagccaaaatgaggaggccttcagaaaaacttgtggatgctactactgtgattgatatacatgatctacaggtttccaagagaaatcgggaaacttcacataaaaggaaaagtttatcccaagattcaatacccgacgaaccgcaattgagagaagtcgtcgtctcaaaggattatggaactccaaaagggaaaaaaacggaagatgaaatacacgaggataccgctcatctaatgaccacttccaacaacaacagcaacaacaaaaacgaaaaaaaactaactagcaacaatagccctaaaaaatcgtcgcctttacttgacattacaaataaatcggagaataagaaaaagtcaacaagaactaaaaaattgttcaaaaatgcaattgtcaataatttatctgatgaaaattctactacgcgaccctccaagtcgtcaaagggaaccagtaataataacaacaattacaacaatttcgacaataacaattcaaacattaataatgttaataataaatctgttagctttagactaaatgaagatgatttagcagtatttgatttatttggaaatggtaaggcagtgaaacatcaaccaaaaacatatcgcaccaaaaaatga

SEQ ID NO: 10280 - DNA, 1773 bp, Artificial Sequence
  Description of Artificial Sequence: Synthetic polynucleotide
atgccgaagagaaaaattgctcctaacaaggaaagcagcaggcgtacggtctcccacgatgatttaaccccacaaatacaagaatttcaaaacttgatggatctcgaatctcaaaaagtggaaaacatcagacagagttattctaggcaaaactccttattagccaaggataactccatattaaaaattaaagttaatagcttggaaaaaaaaataagccagttggtacaagaaaacgtgactttaagatctaaaacctctataagcgaagctatctacagggaaagattaagtaatcaattacaagtcattgaaaacggtattattcaaagatttgacgaaattttttatatgtttgagaacgtacgtaaaaacgaaaatttgcccagtagtagcttaagaacaatgttgaagagaacgagttccaggagcagatcttgctctttgagttctcccacatactctaaaagttacactaggttatccaatcacgagaataacttatctcatgaaagtagttttaacaaggacgatggtccagatcttgagcctaaggctaaaaaaaggaagagttctaggagacaatctatgtttgtatccacgagtttagaacctgaagacgaaaccggtgaaaacgaacccatgatggaaaattcctctgtagaggtaccggcagaatctcacgagtctgcgcaagtggaggaaacaatagatgccttaaaccctgaagaggaaaatagcgattctgtcagtaattttaccaattctattatagaatactccataccagaggagaatccgacagaacccgagcattcttcttctaaattagaaatattcaatgacagtacaaatatgttaagtacagtgccgtccaatcctttgccgttgcctttaccaggcccatccgcaactttacctactaccactagcgatgcttccacggtctatccttcttccagttcttctactaattctcatccaaagaccaaaattaagcattccatgaagccgcctaggatagaattgaagaaaaaggttattgacgaagtcatgcccgtaagtaacatgagcagcaacagcgaaatatcctttacgagaactagaagaactcgtggtaaagctgtagattacactttgccttctttaagagccaaaatgaggaggccttctgaaaaacttgtggatgctactactgtgattgatatacatgatttacaggtttccaagagaaatagagaaacttctcataaaaggaaaagtttatcccaagattctatacccgacgaaccgcaattgagagaagtcgtcgtctccaaggattatggaactccaaaagggaaaaaaacggaagatgaaatacacgaggataccgctcatttaatgaccacttccaacaacaacagcaacaacaaaaacgaaaaaaaattaactagcaacaatagccctaaaaaaagctctcctttacttgacattacaaataaaagtgagaataagaaaaagagtacaagaactaaaaaattgttcaaaaatgcaattgtcaataatttatctgatgaaaattctactacgaggccctccaagagttccaagggaaccagtaataataacaacaattacaacaatttcgacaataacaatagcaacattaataatgttaataataaatctgttagctttagattgaatgaagatgatttagcagtatttgatttatttggaaatggtaaggcagtgaaacatcaaccaaaaacatatcgcaccaaaaaatga

SEQ ID NO: 10281 - DNA, 915 bp, Saccharomyces cerevisiae
atgactatggacggaaaaaacaaagaagaagagcaatatcttgatctatgcaaaagaatcattgatgaaggtgaatttaggccagatagaacaggcactggtacgttgagtctttttgcaccaccccagctgcgttttagtttacgtgatgataccttcccactactaacgaccaagaaggtttttactagaggtatcatacttgaactattgtggtttttggccggtgatacagacgctaacctattgtctgagcaaggtgttaagatttgggacggtaatggatctcgtgaatatttagataagatggggttcaaagataggaaagtaggagatctggggcccgtttacggatttcaatggaggcattttggtgctaaatacaagacgtgcgatgacgactatactggacaaggtattgatcaattgaaacaggttatacataaactaaagacaaatccctacgatagaagaatcattatgagtgcctggaacccagctgattttgacaaaatggctttgccgccatgccatattttttcacagttctatgtcagtttccccaaagaaggagaaggatccggtaagccccgcctttcatgcttattgtaccaacgttcttgtgatatggggttgggagtaccatttaacattgcatcatatgctttgttgactagaatgattgctaaagttgtcgacatggagccaggtgagttcattcatactttgggggatgcacatgtttataaagaccacattgatgccttgaaagaacaaatcaccagaaatccaagaccattcccgaaactaaagattaaaagggacgttaaagacattgatgatttcaagttgacagactttgaaattgaagattataatcctcatccaagaattcaaatgaaaatgagtgtataa

SEQ ID NO: 10282 - DNA, 915 bp, Artificial Sequence
  Description of Artificial Sequence: Synthetic polynucleotide
atgactatggacggaaaaaacaaagaagaagagcaatatcttgatttatgcaaaagaatcattgatgaaggtgaatttaggccagatagaacaggcactggtacgttgagtctttttgcaccaccccagttgcgttttagtttacgtgatgataccttcccattgttgacgaccaagaaggtttttactagaggtatcatacttgaattattgtggtttttggccggtgatacagacgctaaccttttgtctgagcaaggtgttaagatttgggacggtaatggatctcgtgaatatttagataagatggggttcaaagataggaaagtaggagatttagggcccgtttacggatttcaatggaggcattttggtgctaaatacaagacgtgcgatgacgactatactggacaaggtattgatcaattgaaacaggttatacataaattgaagacaaatccctacgatagaagaatcattatgagtgcctggaacccagctgattttgacaaaatggctttgccgccatgccatattttttcccagttctatgtcagtttccccaaagaaggagaaggatccggtaagccccgcctttcttgcttattgtaccaacgttcttgtgatatggggttgggagtaccatttaacattgcaagttatgctttgttgactagaatgattgctaaagttgtcgacatggagccaggtgagttcattcatactttgggggatgcacatgtttataaagaccacattgatgccttgaaagaacaaatcaccagaaatccaagaccattcccgaaattgaagattaaaagggacgttaaagacattgatgatttcaagttgacagactttgaaattgaagattataatcctcatccaagaattcaaatgaaaatgagtgtatga

SEQ ID NO: 10283 - DNA, 1041 bp, Saccharomyces cerevisiae
atgatgtctgatttaacaccaatattccgtaagtatgttgctgttatcgatgatgctagaaatgagcaaaatggtatagatgatcatgttgaaaggaaacaagaggacttcgggaattctaatgaaacgtgtgaaatgtttagggattcgtttattaaggaatgtgcaagactattgaagttcctagtcgaattaaacaaggtaataaaacagattgaaaaaaactatttagatgactttaatatgagtgatgcggaaaaggacgagtttgacatggaatgcaggctgcaaattcaacaatatttcaaaaagtttgaattcctagagaattacgaaatggaaaggcataatttgtcgctgaaaagatttcagtcaaagtctcacagatggtcaaaaatactttccaataaaaacgacaacactaagcatgtgatacatccgcaagacattgaaaatggagtttatgaatttagattaggtgtcctacggtgtttgaatttgtggataaaatatgtttcatccaaattcactaccatacaacaggaaagattgatattagaaaataaaatgaatttcaattcaacgcctatgcctactttatccaacaatgcggatgatttctctgcagatgcaatagacatctcagtgtcacaatctgctcccgtagaaactgtacaagacgaagtaaaacattatgaagagacgatatccaaattaacccaggagcaactacaagtgttggagacagaacattcggaactgctaaatcaaaaaaatgagcaattgaaaaaagtggagactataaacaaaacaattttagacattgtcaatatacagaacgaattgtccaatcatttaacggtgcaatctcaaaatataaacctaatgctgaacaatcaagatgacattgaattgaatattaagaagggaaataaagaattacgtaaagcgaaacgagctgctggaagaactgctaaaatgaccacttatggtgccattatcatgggtgtttttatattgttcctagattatgtaggttaa

SEQ ID NO: 10284 - DNA, 1041 bp, Artificial Sequence
  Description of Artificial Sequence: Synthetic polynucleotide
atgatgtctgatttaacaccaatattccgtaagtatgttgctgttatcgatgatgctagaaatgagcaaaatggtatagatgatcatgttgaaaggaaacaagaggacttcgggaattctaatgaaacgtgtgaaatgtttagggattcttttattaaggaatgtgcaagattattgaagttcttggtcgaattaaacaaggtaataaaacagattgaaaaaaactatttagatgactttaatatgagtgatgcggaaaaggacgagtttgacatggaatgcaggttacaaattcaacaatatttcaaaaagtttgaattcttggagaattacgaaatggaaaggcataatttgtctttgaaaagatttcagtccaagtctcacagatggtccaaaatactttccaataaaaacgacaacactaagcatgtgatacatccgcaagacattgaaaatggagtttatgaatttagattaggtgtcttgagatgtttgaatttgtggataaaatatgtttcttccaaattcactaccatacaacaggaaagattgatattagaaaataaaatgaatttcaattctacgcctatgcctactttatccaacaatgcggatgatttctctgcagatgcaatagacatcagtgtgagtcaatctgctcccgtagaaactgtacaagacgaagtaaaacattatgaagagacgatatccaaattaacccaggagcaattacaagtgttggagacagaacattctgaattattgaatcaaaaaaatgagcaattgaaaaaagtggagactataaacaaaacaattttagacattgtcaatatacagaacgaattgtccaatcatttaacggtgcaatctcaaaatataaacttgatgttgaacaatcaagatgacattgaattgaatattaagaagggaaataaagaattacgtaaagcgaaaagagctgctggaagaactgctaaaatgaccacttatggtgccattatcatgggtgtttttatattgttcttggattatgtaggttga

SEQ ID NO: 10285 - DNA, 2244 bp, Saccharomyces cerevisiae
atgtcgttattagagcaattagcaagaaaaagaatagaaaaatctaaaggccttttaagtgcggaccagtctcatagtacatcgaaaagtgcatccttactagaaagactacataagaatagagaaactaaagataacaatgctgagacaaaaaggaaggatctgaagacgctacttgcaaaagacaaggtaaaaagaagcgactttaccccgaaccagcatagtgtttcattgagtttaaagttgtctgccttaaagaagtcaaatagtgatttggagaaacaaggaaaatcagtgacattagacagcaaagaaaacgaactccctaccaaaaggaaatcgcctgatgataaactcaacttagaagagtcatggaaggctattaaagaaatgaaccattactgtttcttgaaaaacgatccatgcataaatcaaaccgacgattttgcgttcacaaactttatcataaaagataaaaaaaactcgttgagtacatcaataccgctatcgtcgcagaattcatcatttctgtccttaaaaaagcataacaatgagctccttggtatttttgtgccttgtaacctgccgaaaacaactcgtaaagtagccattgagaatttcaatagaccaagtcctgatgatataatacaatcggcccaacttaatgctttcaatgaaaaattagaaaacttaaatatcaaatctgtgcccaaggccgaaaaaaaggaaccaattaaccttcaaacaccacctactgagtcgattgatattcattcattcattgccacccatcctctgaatttgacatgtttgttcctcggtgatacaaacgcaggcaaatccactttgcttggtcatcttttatatgatctaaacgaaatttctatgtcatcaatgagggaactacaaaaaaaaagcagtaatttggatccttcatcttcaaatagttttaaggtcattctagacaataccaaaacagaaagagaaaatggattttccatgtttaagaaagttattcaggtagaaaatgatttactaccgccatcatcaaccttgacgcttatagacactcctggtagtatcaaatacttcaataaagaaactctgaactcaattttgacctttgatcctgaagtttatgtattggttattgattgcaattatgactcgtgggaaaaatcattagatggtccaaataatcagatttatgaaattttaaaagtgatctcttatttgaacaagaattccgcatgcaaaaagcacttgataattcttttgaataaggcagatctaattagttgggataagcaccgactagaaatgattcagtctgagctaaattatgtgttgaaggaaaactttcagtggacagacgcagaattccaatttatcccgtgttcgggtttattaggttcgaatttgaataaaactgaaaacatcacaaaatctaagtataagtcagaatttgactctataaattatgttcccgaatggtatgaaggtccgacatttttttcgcaactatatctattggtagagcataatatgaacaaaatagaaacaactttggaagagccatttgtaggcacaatactgcaatcttctgttcttcaaccgatagcggagataaattacgtgtcactcaaagtcttgatcaacagcggatatattcaatcaggccagacaattgaaattcatacacaatatgaagattttcattactatggtatagtttcaagaatgaagaattcaaaacaaatactggagactaacacaaaaaataatatatcagtcggtttgaaccctgacattttagaggttcttgttaagattcataataccgaagacttcacgaaaaagcaatttcacattcgtaagggtgatataataattcactctagaaagacgaatacactatcaccgaatttaccaaacacactaaagttgttagccttgcgtttaataaaattatcaatacaaacgcacgcgctaagtgatcccgttgacttgggttctgaattgcttctttaccataatttgacgcacaacgcggtaaaattggtgaagattctcgggactaacgacatctcaattaatccaaatcagtcacttattgtcgaagtcgaaattatagaaccagactttgctcttaatgtgattgattccaaatacattaccaacaatattgttttaacatcaatagatcataaggttatcgcagttggcagaattgcatgccagtaa

SEQ ID NO: 10286 - DNA, 2244 bp, Artificial Sequence
  Description of Artificial Sequence: Synthetic polynucleotide
atgtctttattagagcaattagcaagaaaaagaatagaaaaatctaaaggccttttaagtgcggaccagtctcatagtacaagtaaaagtgcatccttattggaaagattacataagaatagagaaactaaagataacaatgctgagacaaaaaggaaggatttgaagacgttacttgcaaaagacaaggtaaaaagaagcgactttaccccgaaccagcatagtgtttctttgagtttaaagttgtctgccttaaagaagagcaatagtgatttggagaaacaaggaaaatctgtgacattagacagcaaagaaaacgaactccctaccaaaaggaaatctcctgatgataaactcaacttagaagagagttggaaggctattaaagaaatgaaccattactgtttcttgaaaaacgatccatgcataaatcaaaccgacgattttgcgttcacaaactttatcataaaagataaaaaaaactctttgagtacatctataccgttatcttctcagaattcttcttttctttccttaaaaaagcataacaatgagctccttggtatttttgtgccttgtaacttaccgaaaacaactcgtaaagtagccattgagaatttcaatagaccaagtcctgatgatataatacaatctgcccaacttaatgctttcaatgaaaaattagaaaacttaaatatcaaatctgtgcccaaggccgaaaaaaaggaaccaattaaccttcaaacaccacctactgagtctattgatattcattctttcattgccacccatcctttaaatttgacatgtttgttcctcggtgatacaaacgcaggcaaatccactttgcttggtcatcttttatatgatttgaacgaaatttctatgtcttctatgagggaattacaaaaaaaaagcagtaatttggatccttcttcttccaatagttttaaggtcattttggacaataccaaaacagaaagagaaaatggattttccatgtttaagaaagttattcaggtagaaaatgatttattaccgccatcttccaccttgacgcttatagacactcctggtagtatcaaatacttcaataaagaaactttgaactctattttgacctttgatcctgaagtttatgtattggttattgattgcaattatgactcttgggaaaaatctttagatggtccaaataatcagatttatgaaattttaaaagtgatctcttatttgaacaagaattccgcatgcaaaaagcacttgataattcttttgaataaggcagatttgattagttgggataagcaccgtttagaaatgattcagtctgagttgaattatgtgttgaaggaaaactttcagtggacagacgcagaattccaatttatcccgtgttctggtttattaggtagtaatttgaataaaactgaaaacatcacaaaatctaagtataagtctgaatttgactctataaattatgttcccgaatggtatgaaggtccgacatttttttctcaattatatcttttggtagagcataatatgaacaaaatagaaacaactttggaagagccatttgtaggcacaatattgcaatcttctgttcttcaaccgatagcggagataaattacgtgagtctcaaagtcttgatcaacagcggatatattcaaagtggccagacaattgaaattcatacacaatatgaagattttcattactatggtatagtttctagaatgaagaattctaaacaaatattggagactaacacaaaaaataatatatctgtcggtttgaaccctgacattttagaggttcttgttaagattcataataccgaagacttcacgaaaaagcaatttcacattcgtaagggtgatataataattcactctagaaagacgaatacattatctccgaatttaccaaacacattgaagttgttagccttgcgtttaataaaattatctatacaaacgcacgcgttaagtgatcccgttgacttgggttctgaattgcttctttaccataatttgacgcacaacgcggtaaaattggtgaagattctcgggactaacgacatctctattaatccaaatcagtctcttattgtcgaagtcgaaattatagaaccagactttgctcttaatgtgattgattccaaatacattaccaacaatattgttttaacatctatagatcataaggttatcgcagttggcagaattgcatgccagtga

SEQ ID NO: 10287 - DNA, 699 bp, Saccharomyces cerevisiae
atggcagattatgatagtgcgaaatattggtccaagcagggagctcgtcgtgggttacagaaaacccgttactactgccaaatatgccaaaggcaatgtaaagatgcaaacggatttcaatcacataacaaatcgccatctcatttaaggaagattagtcaagtgacagctgaggacgctaggcgctacaatatccagtttgaaaagggatttctacagttattgaagcagcggcacggagaaaaatggattgatgctaacaaagtatacaacgagtatgttcaagatcgcgatcatgtacatatgaatgccaccatgcatcgttctttgacgcagtttgtccggtacctaggccgcgcgggcaaggtagacgtggatatggatattgatgatacatctgagaacgttgaaggtcctttgcttatcaggatccatccctcatctttatcatcaccttctgaagatggaatgctgcgaagtcaacaagaggagcaagaagtcatagccgccgagcttttgaaaagacaactcaatcgtgctaagcgacaaactgaaaaggtatatcaaccagagatgaaatcggaaattagcggggatagcactctgaaacgtgttcaagtcaccttccacgggaatggtcgggtaaataaaaagaaaaagaaggttcctccacggaaagatggtatcaagttccgttga

SEQ ID NO: 10288 - DNA, 699 bp, Artificial Sequence
  Description of Artificial Sequence: Synthetic polynucleotide
atggcagattatgatagtgcgaaatattggtccaagcagggagctcgtcgtgggttacagaaaacccgttactactgccaaatatgccaaaggcaatgtaaagatgcaaacggatttcaatctcataacaaatctccatctcatttaaggaagattagtcaagtgacagctgaggacgctaggcgctacaatatccagtttgaaaagggatttttgcagttattgaagcagagacacggagaaaaatggattgatgctaacaaagtatacaacgagtatgttcaagatcgcgatcatgtacatatgaatgccaccatgcatcgttctttgacgcagtttgtcagatacttgggccgcgcgggcaaggtagacgtggatatggatattgatgatacatctgagaacgttgaaggtcctttgcttatcaggatccatccctcttctttatcttctccttctgaagatggaatgttaagaagtcaacaagaggagcaagaagtcatagccgccgagcttttgaaaagacaactcaatcgtgctaagagacaaactgaaaaggtatatcaaccagagatgaaaagtgaaattagcggggatagcactttgaaacgtgttcaagtcaccttccacgggaatggtagagtaaataaaaagaaaaagaaggttcctccaagaaaagatggtatcaagttccgttga

SEQ ID NO: 10289 - DNA, 645 bp, Saccharomyces cerevisiae
atgagtaatggacacgtcaagtttgatgccgatgaaagtcaagccagcgcaagtgctgtcacggatagacaagatgatgtgctggtaatatcaaaaaaggacaaggaagtgcattcaagtagtgatgaggaaagtgatgatgatgatgctccacaagaagaagggcttcactctgggaaaagtgaggtagaatcacagatcactcagagggaggaggctataaggctggaacaatcacaattgcggtccaagagaaggaagcaaaatgaattatacgccaagcaaaagaaatcagtgaatgagacagaggtcactgatgaagtaattgcggagcttcctgaggaattgctaaaaaatatagatcagaaggacgaaggtagtacgcagtactcatcttcaagacatgtaactttcgataaattggatgagtcagatgaaaatgaagaggcattggctaaagctataaaaactaagaaaaggaagacattaaaaaatttaaggaaagattcggtgaaaagaggaaaatttagagttcaattgttatccaccacacaagattctaaaacattaccaccaaagaaagaatcatccatcatacgttcaaaagaccgttggctaaatagaaaggctttgaataaagggtaa

SEQ ID NO: 10290 - DNA, 645 bp, Artificial Sequence
  Description of Artificial Sequence: Synthetic polynucleotide
atgagtaatggacacgtcaagtttgatgccgatgaaagtcaagccagcgcaagtgctgtcacggatagacaagatgatgtgttagtaatatccaaaaaggacaaggaagtgcattctagtagtgatgaggaaagtgatgatgatgatgctccacaagaagaagggcttcactctgggaaaagtgaggtagaatctcagatcactcagagggaggaggctataaggttagaacaatctcaattgcgttccaagagaaggaagcaaaatgaattatacgccaagcaaaagaaatctgtgaatgagacagaggtcactgatgaagtaattgcggagcttcctgaggaattgttgaaaaatatagatcagaaggacgaaggtagtacgcagtactcttcttctagacatgtaactttcgataaattggatgagtctgatgaaaatgaagaggcattggctaaagctataaaaactaagaaaaggaagacattaaaaaatttaaggaaagattctgtgaaaagaggaaaatttagagttcaattgttatccaccacacaagattctaaaacattaccaccaaagaaagaatcttccatcatacgttctaaagaccgttggttaaatagaaaggctttgaataaagggtga

SEQ ID NO: 10291 - DNA, 942 bp, Saccharomyces cerevisiae
atgaagtttttgggtgtaatactgctagcaagttttcttttgattgctaccttcctcatagggcttatcccattgtattatattgataaacaaaaaagttccattgtcacaaaccaagaaggtgctgactcaatttctgattttactacgaacgcagatactcaaacgatcaatgacgatgttagtagttaccgtgtgaagattgccgttctatcacaattcggtataggaatgttgttaggtacatcatttatgttggtaataccggaaggtatcaaagcgtgtgtcgaacatgatggaaacgttggtgtgaatttattaattgggtttctaggtgtttatgttcttgataggttggttacactatgggtttctagaaagcaaacggtctatacgcatgatgctgtcaaatttcaaagctggaaagatataataaaccatccaagacaaatatggatgaacttaatacaaaacaatgttgtctttgccttattcattcatggactatctgatggaattgcattaggtacgacaacgaacaatgattcactgctcatagtggtgttaattgctatagttattcataaaattcctgccgttctttccctcactagtttgatggtatcgagacaaaacttaatgaaatgggaggtgatctgtaacgttttcttgtttgcgtcatcgactccgatcggatacatagtgttatcccttttgaatctgagtcattcgccaacgatggattggataagtggaaatcttctgcttatgagtggtggcagtttactatatgcgtctttcacagcatttgttggtggagattctcatgatcacgatctcagcgttgaacaggaagtcgttttacctcatgatgaatccgtttatgttttgataggtgtctgcataccgttggtgatatcgtactgcatctctgaagaataa

SEQ ID NO: 10292 - DNA, 942 bp, Artificial Sequence
  Description of Artificial Sequence: Synthetic polynucleotide
atgaagtttttgggtgtaatattattggcaagttttcttttgattgctaccttcctcatagggcttatcccattgtattatattgataaacaaaaaagttccattgtcacaaaccaagaaggtgctgacagtatttctgattttactacgaacgcagatactcaaacgatcaatgacgatgttagtagttaccgtgtgaagattgccgttttatctcaattcggtataggaatgttgttaggtacatcttttatgttggtaataccggaaggtatcaaagcgtgtgtcgaacatgatggaaacgttggtgtgaatttattaattgggtttttaggtgtttatgttcttgataggttggttacattatgggtttctagaaagcaaacggtctatacgcatgatgctgtcaaatttcaaagctggaaagatataataaaccatccaagacaaatatggatgaacttaatacaaaacaatgttgtctttgccttattcattcatggattatctgatggaattgcattaggtacgacaacgaacaatgattctttactcatagtggtgttaattgctatagttattcataaaattcctgccgttctttccctcactagtttgatggtatctagacaaaacttaatgaaatgggaggtgatctgtaacgttttcttgtttgcgtcttctactccgatcggatacatagtgttatcccttttgaatttgagtcattctccaacgatggattggataagtggaaatcttttacttatgagtggtggcagtttattatatgcgtctttcacagcatttgttggtggagattctcatgatcacgatctcagcgttgaacaggaagtcgttttacctcatgatgaatccgtttatgttttgataggtgtctgcataccgttggtgatatcttactgcatctctgaagaatga

SEQ ID NO: 10293 - DNA, 2199 bp, Saccharomyces cerevisiae
atgtcttccccagggaattcaggcgtggctatagattctaccgttctgaaagcaattgaattaggaacgaggctttttaaatctggagaatatttgcaagcgaaaaggatattcacaaatgctttgagagtatgtgattcttattctcaggagcagattatgcgcattaggaacgcgtatcaattagatactgcgagaccggataacaaacgattatatcatcctagatacataaagatattggataacatctgtgcgtgctacgaaaaattgaatgatttgaaatcttgtttggacgtatcacaaaggttacttaagttagaaccaggtaatatcaaatgctatatacgatgtacaaggacgttgataaaattaaaagactggaaaagggcatataaaacatgttctcgtggactgcaattatgcaataacgatagcaatcatctaagacaacaaaaacaattcattaaaaataacatggttcaaaaacaggacggcaagagaagttatatagatccattagaggagaccaaaatagcaaaaaaaaaaaagaataataatgttctagaatcgttaccaaagaagaagattaaaggtagtaccaagaaaactgatttagttggcaatttgccgatagaaatactacctatcatattccaaaggtttaccactaaggagcttgttacgttgtcgctagtttgtaacaaatggagggacaaaattttgtatcatttagactgcttccaagaattcaacttggcaccaataaattttaaaaattttgtaaagtttatggattttttacaacagaatttcaccaggacgtatagaaaatatattctttcacaagtaaaagtcagttctagaatcacttcggaagagttacgaataactcaattattattcagtaaaatgccgaaatgtataaacatcgaacggcttatactgtcaatgccaacactaactacaacacaaatctttaagttaatggttagaggaggcacagatttttttacaaggctgctggaattatctctcatgataacttataggcctgataaacaacatgaattggagatactgcagacttgtcctctgttgaaaaaaatagaattaatttttgtcaattcactggtaccaattttcgacggaaataatagcgttgggagggatggaagtttcaatgtgatggcccgtcatactaatatgcagatatccactgcggataatgatgaacagggaatagtagaagaaaaggtgatttatagtgagctagagaagataacattgatatgtgataagaagaaaattaagaattttccactttgtcgtgctctattaagaggccagtttcctctattgcagaaactgacgataactggtgtaacatttcctatgaataatcaagacataatgaattttcaatggctattgaacttcccagacctaaaagaactatggatagaagataacgacaactgtgaactcagtaagtttttgcaattgttaaaattttcgaatgtctggaaaaacttggaaaagttaacctttagagagaacaagctatatccaattgttaatttggatgaagatcagcctgttacgaatgacgacgaggtgccatccatgctattttacaaggaaaatctccaaaacctggaaaagttggatctaatggggacatcgataagtggttctgcgttgactagattatgcgagcaggaatacttggatggtcggaaattaagaagtttaaacattgggaattgccccaacatccagttcccaaataatcacgctcatacagcaaggatgatactggatgtgaatgcagttttgaagagactctccaagttggaagaaataaatttatcgcatctcagctccttgaatgatagtacgatgaagtcattcattattaatgtaccatttttggaaaatttaaagaggcttgacatttcgcacaattttgaaattacaggaatatcaatatatgaatttctaaaaaaatttcagatggatcatgacaacgaagcgggaggtcaaccactggcatatttaaatattgacggatgttcccaagtgtctcatatcacagttaatatgatccgagcgcagaacttagttactcaagtggattgtgtttatgaaagagatgtatggagaaaatttggaattaattcatattcatactcatag

SEQ ID NO: 10294 - DNA, 2199 bp, Artificial Sequence
  Description of Artificial Sequence: Synthetic polynucleotide
atgtcttccccagggaatagtggcgtggctatagattctaccgttttgaaagcaattgaattaggaacgaggctttttaaatctggagaatatttgcaagcgaaaaggatattcacaaatgctttgagagtatgtgattcttattctcaggagcagattatgcgcattaggaacgcgtatcaattagatactgcgagaccggataacaaaagattatatcatcctagatacataaagatattggataacatctgtgcgtgctacgaaaaattgaatgatttgaaatcttgtttggacgtatctcaaaggttacttaagttagaaccaggtaatatcaaatgctatataagatgtacaaggacgttgataaaattaaaagactggaaaagggcatataaaacatgttctcgtggattacaattatgcaataacgatagcaatcatttaagacaacaaaaacaattcattaaaaataacatggttcaaaaacaggacggcaagagaagttatatagatccattagaggagaccaaaatagcaaaaaaaaaaaagaataataatgttttggaatctttaccaaagaagaagattaaaggtagtaccaagaaaactgatttagttggcaatttgccgatagaaatattacctatcatattccaaaggtttaccactaaggagcttgttacgttgtccttggtttgtaacaaatggagggacaaaattttgtatcatttagactgcttccaagaattcaacttggcaccaataaattttaaaaattttgtaaagtttatggattttttacaacagaatttcaccaggacgtatagaaaatatattctttctcaagtaaaagtcagttctagaatcacttctgaagagttaagaataactcaattattattcagtaaaatgccgaaatgtataaacatcgaaagacttatattatctatgccaacattgactacaacacaaatctttaagttaatggttagaggaggcacagatttttttacaaggttattggaattatctctcatgataacttataggcctgataaacaacatgaattggagatattacagacttgtcctttattgaaaaaaatagaattaatttttgtcaattctttagtaccaattttcgacggaaataatagcgttgggagggatggaagtttcaatgtgatggcccgtcatactaatatgcagatatccactgcggataatgatgaacagggaatagtagaagaaaaggtgatttatagtgagttagagaagataacattgatatgtgataagaagaaaattaagaattttccactttgtcgtgctttattaagaggccagtttcctttattgcagaaattaacgataactggtgtaacatttcctatgaataatcaagacataatgaattttcaatggttattgaacttcccagacttgaaagaattatggatagaagataacgacaactgtgaactcagtaagtttttgcaattgttaaaattttctaatgtctggaaaaacttggaaaagttaacctttagagagaacaagctttatccaattgttaatttggatgaagatcagcctgttacgaatgacgacgaggtgccatccatgttattttacaaggaaaatctccaaaacttggaaaagttggatttgatggggacatctataagtggttctgcgttgactagattatgcgagcaggaatacttggatggtagaaaattaagaagtttaaacattgggaattgccccaacatccagttcccaaataatcacgctcatacagcaaggatgatattggatgtgaatgcagttttgaagagactctccaagttggaagaaataaatttatctcatctcagctccttgaatgatagtacgatgaagagtttcattattaatgtaccatttttggaaaatttaaagaggcttgacatttctcacaattttgaaattacaggaatatccatatatgaatttttgaaaaaatttcagatggatcatgacaacgaagcgggaggtcaaccattggcatatttaaatattgacggatgttcccaagtgtctcatatcacagttaatatgatccgtgcgcagaacttagttactcaagtggattgtgtttatgaaagagatgtatggagaaaatttggaattaattcttattcttactcctga

SEQ ID NO: 10295 - DNA, 2250 bp, Saccharomyces cerevisiae
atgtctaataccttgccagtaacagaatttcttttatccaaatactacgaactttccaacactcctgccacagactcatcatcgctcttcaaatggttataccacaagactctctcccgtaaacagctgctcatatccgatttgtcttcccagaaaaaacacgccatctcctacgatcaatggaatgacatagcgtcgcgattagacgacttaacgggactttccgaatggaaaacaatcgacgagtcctcgttgtataactataagctgctgcaagacttgaccatccgtatgcgccatttgagaaccactcacgactaccaccgcctgctttatctgattagaactaagtgggtccgtaatcttggcaacatgaataacgttaatctttacaggcactcgcataccggcacaaaacaaattatacatgactacctagaagagtctcaagcagtgctcaccgcgctgatccatcagtcaaatatgaacgatcactatctcctcggtattttgcaacagacgagaagaaacatagggcgcacggctctcgtgcttagcggtgggagcactttcggccttttccacattggtgttcttgccgccctttttgaatcggacctgatgcctaaggtgatcagcggtagcagtgctggcgccattgttgccagcatattttgcgtccacacgacccaggaaattccctccttgttgaccaatgtacttaatatggagtttaacatcttcaatgacgacaattccaaatctcccaacgaaaacttactaatcaagatatcgaggttctgccaaaacggtacctggttcaataatcaacctttgattaacacaatgctttcgtttttaggaaacttgacctttagggaagcctacaacaagactggaaaaatcctgaatatcacagtctcgcctgcttccatatacgaacagccgaaactactaaacaatttaaccgctccaaacgttctcatctggtctgccgtatgcgcatcttgttctctacctggagttttcccctccacgccgctattcgagaaagatcctcacactggaaagattaaagagtggggggcaacaaatttacatttatcaaacatgaaattcatggacggatctgtagataatgacatgcccatttctcgtctttctgaaatgttcaatgtcgaccacattatcgcctgccaggtaaatatacatgtctttcccctgttaaagttttcaaacacttgcgttgggggtgaaattgaaaaggaaattaccgcccgtttcagaaaccaagtaacaaagatcttcaaatttttttccgacgaaactattcattttttagacatcctaaaggagcttgagttccatccctatttgatgaccaaattgaaacacctttttttacaacaatactctggcaatgtcacaattttacccgatctatcaatggttggtcaattccacgaagtattgaagaacccatctcaacttttcctattgcaccaaactactttaggtgcaagagctacttggccgaaaatttccatgattcaaaataactgtggccaagaattcgccttggataaggccatcacattcctaaaggagaaaataataatctcttcgtcaataaaaaaccctttacaattctaccaacctcgattcagtgagcaaatcaaatctctttccataatggatgctgacttgccgggagttgacttggaagaatcctcctccaattcactatcaattatcaagtctcccaacaaaacagcggcaccgggaagatttcctcttcagccattgccttctccatcttctaccttcaacaagaggaaaatggatatgttatcgccttctccatcgccttctacatctccacaacgttcaaaatcttcattcacgcagcagggtacaaggcagaaggcaaattctttatcgtttgccatcggtgcatctagtttacggctaaagaaatcaccattgaaggttccatcacgacctcaattcaaaaaaagatcttcttattataatcaaaatatgtcggcagagatgaggaaaaatagaaaaaaatctggaacaatttcctcttatgatgttcaaacaaactcagaagattttcccataccggctattgaaaacggttcatttgataacactttattcaatccaagcaggttccccatggacgctatgtcggctgccacaaacgacaatttcatgaacaattcagacatttttcaaaattga

SEQ ID NO: 10296 - DNA, 2250 bp, Artificial Sequence
  Description of Artificial Sequence: Synthetic polynucleotide
atgtctaataccttgccagtaacagaatttcttttatccaaatactacgaactttccaacactcctgccacagactcttcttctctcttcaaatggttataccacaagactctctcccgtaaacagttgctcatatccgatttgtcttcccagaaaaaacacgccatctcctacgatcaatggaatgacatagcgtctagattagacgacttaacgggactttccgaatggaaaacaatcgacgagtcctctttgtataactataagttattacaagacttgaccatccgtatgcgccatttgagaaccactcacgactaccaccgcttactttatttgattagaactaagtgggtccgtaatcttggcaacatgaataacgttaatctttacaggcactctcataccggcacaaaacaaattatacatgactacttggaagagtctcaagcagtgctcaccgcgttgatccatcagtctaatatgaacgatcactatctcctcggtattttgcaacagacgagaagaaacatagggcgcacggctctcgtgcttagcggtgggagcactttcggccttttccacattggtgttcttgccgccctttttgaaagtgacttgatgcctaaggtgatcagcggtagcagtgctggcgccattgttgccagcatattttgcgtccacacgacccaggaaattccctccttgttgaccaatgtacttaatatggagtttaacatcttcaatgacgacaattccaaatctcccaacgaaaacttattgatcaagatatctaggttctgccaaaacggtacctggttcaataatcaacctttgattaacacaatgctttcttttttaggaaacttgacctttagggaagcctacaacaagactggaaaaatcttgaatatcacagtctctcctgcttccatatacgaacagccgaaattattaaacaatttaaccgctccaaacgttctcatctggtctgccgtatgcgcatcttgttctttgcctggagttttcccctccacgccgcttttcgagaaagatcctcacactggaaagattaaagagtggggggcaacaaatttacatttatctaacatgaaattcatggacggatctgtagataatgacatgcccatttctcgtctttctgaaatgttcaatgtcgaccacattatcgcctgccaggtaaatatacatgtctttcccttattaaagttttccaacacttgcgttgggggtgaaattgaaaaggaaattaccgcccgtttcagaaaccaagtaacaaagatcttcaaatttttttccgacgaaactattcattttttagacatcttgaaggagcttgagttccatccctatttgatgaccaaattgaaacacctttttttacaacaatactctggcaatgtcacaattttacccgatttatctatggttggtcaattccacgaagtattgaagaacccatctcaacttttcttgttgcaccaaactactttaggtgcaagagctacttggccgaaaatttccatgattcaaaataactgtggccaagaattcgccttggataaggccatcacattcttgaaggagaaaataataatctcttcttctataaaaaaccctttacaattctaccaacctagattcagtgagcaaatcaaatctctttccataatggatgctgacttgccgggagttgacttggaagaatcctcctccaattctttatccattatcaagtctcccaacaaaacagcggcaccgggaagatttcctcttcagccattgccttctccatcttctaccttcaacaagaggaaaatggatatgttatctccttctccatctccttctacatctccacaacgttctaaatcttctttcacgcagcagggtacaaggcagaaggcaaattctttatcttttgccatcggtgcatctagtttaaggttaaagaaatctccattgaaggttccaagtaggcctcaattcaaaaaaagatcttcttattataatcaaaatatgtctgcagagatgaggaaaaatagaaaaaaatctggaacaatttcctcttatgatgttcaaacaaactctgaagattttcccataccggctattgaaaacggttcttttgataacactttattcaatccaagcaggttccccatggacgctatgtctgctgccacaaacgacaatttcatgaacaatagtgacatttttcaaaattga

SEQ ID NO: 10297 - DNA, 888 bp, Saccharomyces cerevisiae
atgagtttgagaacgccgaagagaagcaggactagcgatgaacaagaacaagaacaagaacaagagcaggtacagaacccagatacacatgtaaacaacgagcatcagcagcgacctgggccaaccactctattgagcacgccagtacgtctcaaaaatggctttggaacaccatcgccgccgtcaccaccaggcataacgaaaagcatcactaaatcgagaagaaggccgtcgacaacgagtcttcagggtatattcatgtcgcccgtcaataagcgtcgtgtcggcataaccgcacatggacgtgtatatgaccataacgacgacggacacgaaagtgagagtgaggacgacgaaaatgaagaagaaaatgaaaatcaaaagaagtacgacggacacgttagtatgcctttgttgccaccgacaacgcccaagtcaagacggtcggaggtgtttctgtcgccgtcgccgcgtttgaggtcacctccgacggctgcgcgtcggtctacgggcgagcggcccatccgcgaaatatcacatactttgcgcaccaggctcaattacgcgttagtcaagctgcaaaatggatggacggacaagacacttcccgagctggagacggagcttgctccagcagtgcagacgccgccacgtcgctatcacaacagatttccagatagtgcagacgcgggtacttccgcgcatacagcgtttcttcaggcgctcggaggccacccaccacgggaggaggccacggctgtcgaaacactgatgctattgtcgtcgcctaccaagaagcaacaacaccgacccgtgccggcgacatctgctggagaacccacggacgaaacggagcccgagtcggataccgaagtggagacgtcttaa

SEQ ID NO: 10298 - DNA, 888 bp, Artificial Sequence
  Description of Artificial Sequence: Synthetic polynucleotide
atgagtttgagaacgccgaagagaagcaggactagcgatgaacaagaacaagaacaagaacaagagcaggtacagaacccagatacacatgtaaacaacgagcatcagcagaggcctgggccaaccactttattgagcacgccagtacgtctcaaaaatggctttggaacaccatctccgccgtctccaccaggcataacgaaaagcatcactaaatctagaagaaggccgtccacaacgagtcttcagggtatattcatgtctcccgtcaataagcgtcgtgtcggcataaccgcacatggacgtgtatatgaccataacgacgacggacacgaaagtgagagtgaggacgacgaaaatgaagaagaaaatgaaaatcaaaagaagtacgacggacacgttagtatgcctttgttgccaccgacaacgcccaagtctagaagaagtgaggtgtttttatctccgtctccgcgtttgaggtctcctccgacggctgcgcgtcgttctacgggcgagaggcccatccgcgaaatatctcatactttgcgcaccaggctcaattacgcgttagtcaagttacaaaatggatggacggacaagacacttcccgagttagagacggagcttgctccagcagtgcagacgccgccacgtcgctatcacaacagatttccagatagtgcagacgcgggtacttccgcgcatacagcgtttcttcaggcgctcggaggccacccaccaagagaggaggccacggctgtcgaaacattgatgcttttgtcttctcctaccaagaagcaacaacacaggcccgtgccggcgacatctgctggagaacccacggacgaaacggagcccgagtctgataccgaagtggagacgtcttga

SEQ ID NO: 10299 - DNA, 1164 bp, Saccharomyces cerevisiae
atggaacagaacaggttcaagaaagaaacgaaaacttgtagcgctagctggccgcgcgcaccgcagtcgacgctgtgtgcgacagatcgcctcgagctcacatacgatgtgtacactagcgcagagcggcaacgccgctctcgcactgccactaggcttaaccttgtgtttttgcacggcagcggcatgagtaaggtggtatgggagtactatttgccgcgtctggtagccgccgatgcggagggcaattatgccatcgacaaggttttgttgatcgaccaggttaaccacggtgattctgcggtacgcaaccgcggcagactcggcaccaatttcaactggatcgacggggcccgcgacgtgctcaagattgccacatgcgagttgggcagtattgacagccacccggcactaaacgtagtcatcggccactcgatgggcgggttccaggctcttgcgtgtgacgtcctgcagcccaatctgtttcatttgctcatcttgatcgagcctgtagtaatcacacggaaagccatcggcgccgggaggccagggcttccgcccgattctccgcagatcccagaaaatctttataactccctacgtttaaagacgtgcgaccatttcgctaacgagtccgaatatgtaaaatatatgaggaacggttccttttttaccaatgcgcacagccaaatcctgcaaaacatcatcgattttgagaggacaaaagcctctggagacgatgaagatggtggacccgttcgcacgaagatggagcaggctcaaaatctcctctgctacatgaacatgcagacttttgcgcctttcctgatcagcaatgtgaagtttgtgaggaagcggactatccacattgtgggcgcgcgctccaactggtgtcctccgcaaaatcagctgtttttgcagaaaactctacagaactaccatctcgatgtcattcccggcggctcccacttggtcaacgttgaggctccggacctggtgatcgagaggattaatcaccacatccacgagtttgtccttacctccccgctgcagtcctcacacattccgcaattgacccttgaagaaagagcggtgatgtttgaccgggctttcgactcgttcaagaatgaagctttggttaaaacgactaaacaaaaactgtaa

SEQ ID NO: 10300 - DNA, 1164 bp, Artificial Sequence
  Description of Artificial Sequence: Synthetic polynucleotide
atggaacagaacaggttcaagaaagaaacgaaaacttgtagcgctagctggccgcgcgcaccgcagagcacgttgtgtgcgacagatcgcctcgagctcacatacgatgtgtacactagcgcagagagacaacgccgctctcgcactgccactaggcttaaccttgtgtttttgcacggcagcggcatgagtaaggtggtatgggagtactatttgccgcgtttagtagccgccgatgcggagggcaattatgccatcgacaaggttttgttgatcgaccaggttaaccacggtgattctgcggtacgcaaccgcggcagactcggcaccaatttcaactggatcgacggggcccgcgacgtgctcaagattgccacatgcgagttgggcagtattgacagccacccggcattgaacgtagtcatcggccactccatgggcgggttccaggctcttgcgtgtgacgtcttacagcccaatttatttcatttgctcatcttgatcgagcctgtagtaatcacaagaaaagccatcggcgccgggaggccagggcttccgcccgattctccgcagatcccagaaaatctttataactccttacgtttaaagacgtgcgaccatttcgctaacgagtccgaatatgtaaaatatatgaggaacggttccttttttaccaatgcgcacagccaaatcttgcaaaacatcatcgattttgagaggacaaaagcctctggagacgatgaagatggtggacccgttcgcacgaagatggagcaggctcaaaatctcctctgctacatgaacatgcagacttttgcgcctttcttgatcagcaatgtgaagtttgtgaggaagagaactatccacattgtgggcgcgcgctccaactggtgtcctccgcaaaatcagttatttttgcagaaaactttacagaactaccatctcgatgtcattcccggcggctcccacttggtcaacgttgaggctccggacttggtgatcgagaggattaatcaccacatccacgagtttgtccttacctccccgttgcagtcctcccacattccgcaattgacccttgaagaaagagcggtgatgtttgacagagctttcgactctttcaagaatgaagctttggttaaaacgactaaacaaaaattgtga

SEQ ID NO: 10301 - DNA, 1053 bp, Saccharomyces cerevisiae
atgaattggctgtttttggtctcgctggttttcttctgcggcgtgtcaacccatcctgccctggcaatgtccagcaacagactactaaagctggctaataaatctcccaagaaaattatacctctgaaggactcaagttttgaaaacatcttggcaccacctcacgaaaatgcctatatagttgctctgtttactgccacagcgcccgaaattggctgttctctgtgtctcgagctagaatccgaatacgacaccatagtggcctcctggtttgatgatcatccggatgcaaaatcgtccaattccgatacatctattttcttcacaaaggtcaatttggaggacccttctaagaccattcctaaagcgttccagtttttccaactaaacaatgttcctagattgttcatcttcaaaccaaactctccctctattctggaccacagcgtgatcagtatttccactgatactggctcagaaagaatgaagcaaatcatacaagccattaagcagttctcgcaagtaaacgacttctctttacacttacctatggactggactccaattattacctcgacaataattaccttcatcaccgtcttactcttcaaaaagcagtccaaactcatgttctccatcatatcttccaggatcatctgggcaaccttgtcaacttttttcatcatttgcatgatcagtgcctatatgttcaaccaaatcaggaatacccaattggcaggcgttggtcctaagggcgaggttatgtatttcttgcccaatgaattccaacaccaattcgccattgaaactcaagtcatggttcttatttacggaacattggccgcgttggttgtcgtattggtcaagggtatacaattcttgcggtctcatttgtatccagagaccaagaaagcgtacttcattgatgctattttggcctccttttgtgccttattcatttatgtcttctttgctgctttgacaaccgtgttcacgataaagagtcctgcttacccttttcctttactaaggttatcggcaccattcaaataa

SEQ ID NO: 10302 - DNA, 1053 bp, Artificial Sequence
  Description of Artificial Sequence: Synthetic polynucleotide
atgaattggttatttttggtctctttggttttcttctgcggcgtgtctacccatcctgccttggcaatgtccagcaacagattattgaagttggctaataaatctcccaagaaaattatacctttgaaggacagcagttttgaaaacatcttggcaccacctcacgaaaatgcctatatagttgctttgtttactgccacagcgcccgaaattggctgttctttatgtctcgagttagaatccgaatacgacaccatagtggcctcctggtttgatgatcatccggatgcaaaatcttccaattccgatacatctattttcttcacaaaggtcaatttggaggacccttctaagaccattcctaaagcgttccagtttttccaattgaacaatgttcctagattgttcatcttcaaaccaaactctccctctattttggaccacagcgtgatcagtatttccactgatactggctctgaaagaatgaagcaaatcatacaagccattaagcagttctctcaagtaaacgacttctctttacacttacctatggactggactccaattattacctctacaataattaccttcatcaccgtcttactcttcaaaaagcagtccaaactcatgttctccatcatatcttccaggatcatctgggcaaccttgtctacttttttcatcatttgcatgatcagtgcctatatgttcaaccaaatcaggaatacccaattggcaggcgttggtcctaagggcgaggttatgtatttcttgcccaatgaattccaacaccaattcgccattgaaactcaagtcatggttcttatttacggaacattggccgcgttggttgtcgtattggtcaagggtatacaattcttgagatctcatttgtatccagagaccaagaaagcgtacttcattgatgctattttggcctccttttgtgccttattcatttatgtcttctttgctgctttgacaaccgtgttcacgataaagagtcctgcttacccttttcctttattgaggttaagtgcaccattcaaatga

SEQ ID NO: 10303 - DNA, 3561 bp, Saccharomyces cerevisiae
atggccaaagaagatactggggtaacagcaccaaagaagcccgaaacagcccaagtagctaacataaatgggatagataagttagaacctccaaagacgaaagaggaaaccgaatccagtaaaagcgtgtcatctgagaaggcggcacatgctagtgatgaaagcttcaagagaagtatccatgaagcttcttatgtcggctggaaacagattggtggctgggaagacaaagacgaattaactttagatgatgaattgatggatatgactagagaaaccttcttagataacatcataccggacagcctttacggtgactggtatcattcggtagccattttctttatcggaggcgtggcatcatttgcacttggtcattataagttttcaatggggtcggccttttttgtcatcgttatcacttcattgttgtatagaacctctgctaaaaaatacagaggttccataagagagttagtccagaaagagttcacggtgcagaaagtggaaaacgactatgaatccctagaatggttgaatgcctttttggataagtactggcccattttagaaccttccgttagtcaattaatcgttcagcaagctaatgaacaaatggctactaatgaggcgattcccaaatttattactcaactatggatcgatgagttgacacttggtgttaaaccccccagagttgatttggtgaagactttccaaaacactgcatccgatgttgttgtgatggactggggtatttcttttactcctcacgatttatgcgacatgagtgctaagcaagtcagaaattacgttaatgaattagcggttgttaaggccaaaatttttggtatcaccatccctgtttctgtgtcagacattgctttcaaggctcatgctagagtgaaattcaaattgatgactcccttccctcatgtcgaaactgttaatatccagctactgaaggttcctgattttgattttgttgctaccttattcggccgttccatcttcaattgggaaattttagctatcccaggccttatgacactaatacaaaagatggccaagaaatatatgggtccaatcttgttacctccattttctttacaattgaacattccacaactcttatctggttccaacttgtccattggtatattagaaataactgtcaaaaatgcaaaggggctaaaacgtacctcttcgatattgaacgaatcaatcgacccttacttatctttcgaatttaacgatatatctattgccaagacaagaaccgtaagagacacattgaaccccgtttgggacgaaactctgtacgtcttgttaaactcattcactgaccccttgaccattagtgtttatgataagcgtgcaaaattgaaggataaagtcctaggcagaattcagtacaacttgaatactttacatgataaaaccacgcaaagaaacttgaaagctcagtttttaagaaactctaaaccggttggggaattgacttttgatttaagattcttcccaactttagaagagaaaaagttgccggatggatctgtggaggaactaccggatttgaatactggtattgctaaagttgtggtcgaagaaggttctcgttttgctgaagaagaacagaaggttactgcctacgttgaagtttacttgaatgctaaactagtgttaaccactggtaaggcaactgacactggtacattgaagtggaattcagactacgaagcagttattgcagatcgtcgtaaaacaagatataagtttgtcgtcaaggatggcaaaggagaagaaattggatctaccattcaaaccctgaatgatttaatagatagaagccaagtgaacaaaaatttgattccattaaaaaaccaaaagggtgacataaagattaccacatattggagacctgttagactggagattggttccaactctgtagcttacacgccaccaattggcgccatcagagtattcattgagaaggcaaacgatttgagaaatttggaaaagtttggtaccattgatccatactgtaaagttttggttaatggtttatcgaagggtagaactgatttcaagagccaaactttgaatcctgtctggaatcaagttatttatgttgcagttacttcaccaaaccaaagaattacgcttcaatgtatggatgtcgaaacagtcaacaaagatcgttcacttggtgaattcaatgttaacgttcaagatttatttaagaaggatgagaatgataaatatgaggaaactattgatgaaaaagctaaagttggtcgtctagtgatgcctaagaaaaaacctaagggcactataacatactatacctccttttatcccgctttacctgttttaacgttagaggaaatccaagatttagataaagttaacaaaaagaaaaaagcattggaactgcgtaagtcagcaattgatgagaaaaaaatttctaaagaagacaaagccaaatttgatcaagaatggaatgaggtcaaagaattggaagacatgtatagtaatagacagaaattggatttgccagaattattgcaatacaaccaaggtgttcttgctgtcactgtccttaatggggaattgcccgactctgggctatacgtccaagcgtttttcgatgataatggtcatccaagatttgttagtccacgtattccatcgagaattgtcaagaatggttggtcaggtgacgtgatcataaaagaattggacaaatccattaccacttttagagttgctaaaaataaaaactacaacagagtggagaaatgcgtttgtgaagtagaactacccacacaagagttagttaagaactgttattataagccatcaatattacatctttcaggtgaaggcagtgctaaactaatgctccaaatatcatggttccctattgatacaaaacagttgccggcaaatgacctgatcacaaattctggtgatttgacgattatgtcgaggagtgcagaaaacttgatagcatccgatttaaatggttattcggacccatacttaaagtattacatcaataatgaggaagactgcgcttacaagacgaaggttgttaagaaaactttgaatcctaaatggaatgatgaaggaactattcaaatcaataaccgtttaaatgatgttctaagaatcaaagtcatggactgggattccacatctgcggatgataccattggtacagcagaaatcccattgaataaggtcaaagtcgagggtactaccgaattagacgtaccggtagaaggattagagaacgctggtcaagacggtggtatgttgcatttagctttcagctttaagccaagatacaccattagcgtgagtaaaagagaaaagaaggtcggagatatagcatccaagggactaggtactggtttgaaagctggtacgaccgtgataggcggcggtgttggtgccattggcaagatcaagaaaggggtattcggtggactaggcagcctcacaaaccataagaagaatcatgagatgggcgaagaagaaactaagttttag

SEQ ID NO: 10304 - DNA, 3561 bp, Artificial Sequence
  Description of Artificial Sequence: Synthetic polynucleotide
atggccaaagaagatactggggtaacagcaccaaagaagcccgaaacagcccaagtagctaacataaatgggatagataagttagaacctccaaagacgaaagaggaaaccgaatccagtaaaagcgtgtcttctgagaaggcggcacatgctagtgatgaaagcttcaagagaagtatccatgaagcttcttatgtcggctggaaacagattggtggctgggaagacaaagacgaattaactttagatgatgaattgatggatatgactagagaaaccttcttagataacatcataccggacagcctttacggtgactggtatcattctgtagccattttctttatcggaggcgtggcaagttttgcacttggtcattataagttttccatggggtctgccttttttgtcatcgttatcacttctttgttgtatagaacctctgctaaaaaatacagaggttccataagagagttagtccagaaagagttcacggtgcagaaagtggaaaacgactatgaatccttagaatggttgaatgcctttttggataagtactggcccattttagaaccttccgttagtcaattaatcgttcagcaagctaatgaacaaatggctactaatgaggcgattcccaaatttattactcaattatggatcgatgagttgacacttggtgttaaaccccccagagttgatttggtgaagactttccaaaacactgcatccgatgttgttgtgatggactggggtatttcttttactcctcacgatttatgcgacatgagtgctaagcaagtcagaaattacgttaatgaattagcggttgttaaggccaaaatttttggtatcaccatccctgtttctgtgagcgacattgctttcaaggctcatgctagagtgaaattcaaattgatgactcccttccctcatgtcgaaactgttaatatccagttattgaaggttcctgattttgattttgttgctaccttattcggccgttccatcttcaattgggaaattttagctatcccaggccttatgacattaatacaaaagatggccaagaaatatatgggtccaatcttgttacctccattttctttacaattgaacattccacaactcttatctggttccaacttgtccattggtatattagaaataactgtcaaaaatgcaaaggggttgaaacgtacctcttctatattgaacgaaagtatcgacccttacttatctttcgaatttaacgatatatctattgccaagacaagaaccgtaagagacacattgaaccccgtttgggacgaaactttgtacgtcttgttaaactctttcactgaccccttgaccattagtgtttatgataagcgtgcaaaattgaaggataaagtccttggcagaattcagtacaacttgaatactttacatgataaaaccacgcaaagaaacttgaaagctcagtttttaagaaactctaaaccggttggggaattgacttttgatttaagattcttcccaactttagaagagaaaaagttgccggatggatctgtggaggaattaccggatttgaatactggtattgctaaagttgtggtcgaagaaggttctcgttttgctgaagaagaacagaaggttactgcctacgttgaagtttacttgaatgctaaattagtgttaaccactggtaaggcaactgacactggtacattgaagtggaatagtgactacgaagcagttattgcagatcgtcgtaaaacaagatataagtttgtcgtcaaggatggcaaaggagaagaaattggatctaccattcaaaccttgaatgatttaatagatagaagccaagtgaacaaaaatttgattccattaaaaaaccaaaagggtgacataaagattaccacatattggagacctgttagattggagattggttccaactctgtagcttacacgccaccaattggcgccatcagagtattcattgagaaggcaaacgatttgagaaatttggaaaagtttggtaccattgatccatactgtaaagttttggttaatggtttatccaagggtagaactgatttcaagagccaaactttgaatcctgtctggaatcaagttatttatgttgcagttacttctccaaaccaaagaattacgcttcaatgtatggatgtcgaaacagtcaacaaagatcgttctcttggtgaattcaatgttaacgttcaagatttatttaagaaggatgagaatgataaatatgaggaaactattgatgaaaaagctaaagttggtcgtttagtgatgcctaagaaaaaacctaagggcactataacatactatacctccttttatcccgctttacctgttttaacgttagaggaaatccaagatttagataaagttaacaaaaagaaaaaagcattggaattgcgtaagtctgcaattgatgagaaaaaaatttctaaagaagacaaagccaaatttgatcaagaatggaatgaggtcaaagaattggaagacatgtatagtaatagacagaaattggatttgccagaattattgcaatacaaccaaggtgttcttgctgtcactgtccttaatggggaattgcccgactctgggttatacgtccaagcgtttttcgatgataatggtcatccaagatttgttagtccacgtattccatctagaattgtcaagaatggttggtctggtgacgtgatcataaaagaattggacaaatccattaccacttttagagttgctaaaaataaaaactacaacagagtggagaaatgcgtttgtgaagtagaattgcccacacaagagttagttaagaactgttattataagccaagtatattacatctttctggtgaaggcagtgctaaattaatgctccaaatatcttggttccctattgatacaaaacagttgccggcaaatgacttgatcacaaattctggtgatttgacgattatgtctaggagtgcagaaaacttgatagcatccgatttaaatggttattctgacccatacttaaagtattacatcaataatgaggaagactgcgcttacaagacgaaggttgttaagaaaactttgaatcctaaatggaatgatgaaggaactattcaaatcaataaccgtttaaatgatgttttgagaatcaaagtcatggactgggattccacatctgcggatgataccattggtacagcagaaatcccattgaataaggtcaaagtcgagggtactaccgaattagacgtaccggtagaaggattagagaacgctggtcaagacggtggtatgttgcatttagctttcagctttaagccaagatacaccattagcgtgagtaaaagagaaaagaaggtcggagatatagcatccaagggattaggtactggtttgaaagctggtacgaccgtgataggcggcggtgttggtgccattggcaagatcaagaaaggggtattcggtggattgggcagcctcacaaaccataagaagaatcatgagatgggcgaagaagaaactaagttttga

SEQ ID NO: 10305 - DNA, 2028 bp, Saccharomyces cerevisiae
atggtatcagccaacggcgacttgcacttgccaatttctaacgaacagtgcatgccggaaaacaatggatctcttggatttgaggcccccactccgagacagattctcagggttacgttaaatttgaaatacttaattgataaggtcgtacctattgtttacgatcccaatgatattgtttgtgaccattctgagattttatctccaaaagttgtgaagctggcttatgaagcatgtggcgggaaccctaaagacaaggccaacaaaagaaaatatcaatctgtcattattttttcacttcttaaagtttgtgagtggtattccatattggccactatggaagtgcacaatgccaaactttacgaaaccagaaatttagcctcacaacagttatgtaaattgttaattgaaagggaggagacaagagacctgcagtttcttttcatgcagttactgctgcgtcggtacgtaatcaacgagaacgatgaagatcaagaaccgttgaatgccttggaacttgccacagatatgcactgtactacagtgataggatcgagtggatttcagcgttgtttaaaatggatatggagaggatggatagtccaaaatggcttggatcccacaacttttatcaaggacgattcactggcggaagtgtcattgatctctcatttcaaccccgtaagattaaaggcgcctgtataccaaaattatttgcagatgatcttctcatttttgtttctagggctttataccttggtggttaatggtaaggactctgagagagtccaatctttcgatttgttagaaagcatattttatgttttcaatactggtttcatcttggatgagctcactaagctttattatattggttatgcgcacctatcgttttggaatttatttaatgataccacatatttgataatcacgtttgctatggggttccgtgcaatgagcgtaacgccccttaatgcaaaatactcttcagaagattgggataaaatatcatatagagtcttatcctgtgcagcaccatttgtgtggtcgagactcctactataccttgaatcacaaaggtttattgggattatgttggttatcctaaaacatatgatgaaagaatccattgtatttttcttccttctattcttaataatgataggattcactcaaggtttcttaggtttggattccgcagatggtaagagagatatcaccggacccatcctgggtaatttaacaatcaccgttttgggtcttggtagttttgatgttttcgaagaattcgctcccccatatgcggcaatactgtattatggttactattttattgtttcggttatccttttgaatatattaattgctttgtattcgactgcgtaccaaaaagttattgacaatgcagatgacgagtacatggctttgatgtcacaaaagacgttgagatacattagagcacctgatgaagatgtctatgtttctccattgaacttaattgaagtgttcatgacacctatctttcgtattcttccaccgaagcgtgctaaagatttgagctatactgtaatgacaatagtgtacagcccatttttgttgcttatttctgttaaagaaactcgggaggctagaaggataaaatataacaggatgaaaaggttaaacgatgatgccaatgaatatgatactccatgggatttgacagatggctacttggatgatgatgacggtttgttttctgataaccgaaattctggcatgagagccacccagttaaagaattcccgttcgctaaaactgcaaagaacagcagagcaggaagatgtccattttaaagtccctaagaagtggtataaaaacgttaaaaaatgcagtccctccttcgaacagtatgataacgatgacactgaagatgatgctggtgaagataaagatgaagtcaaagagctcactaagaaagtggaaaacttgacagctgtaattaccgatctactcgaaaaattagacataaaggataagaaagagtaa

SEQ ID NO: 10306 - DNA, 2028 bp, Artificial Sequence
  Description of Artificial Sequence: Synthetic polynucleotide
atggtatctgccaacggcgacttgcacttgccaatttctaacgaacagtgcatgccggaaaacaatggatctcttggatttgaggcccccactccgagacagattctcagggttacgttaaatttgaaatacttaattgataaggtcgtacctattgtttacgatcccaatgatattgtttgtgaccattctgagattttatctccaaaagttgtgaagttggcttatgaagcatgtggcgggaaccctaaagacaaggccaacaaaagaaaatatcaatctgtcattattttttcccttcttaaagtttgtgagtggtattccatattggccactatggaagtgcacaatgccaaactttacgaaaccagaaatttagcctctcaacagttatgtaaattgttaattgaaagggaggagacaagagacttacagtttcttttcatgcagttattattacgtcgttacgtaatcaacgagaacgatgaagatcaagaaccgttgaatgccttggaacttgccacagatatgcactgtactacagtgataggaagtagtggatttcagcgttgtttaaaatggatatggagaggatggatagtccaaaatggcttggatcccacaacttttatcaaggacgattctttagcggaagtgtctttgatctctcatttcaaccccgtaagattaaaggcgcctgtataccaaaattatttgcagatgatcttctcctttttgtttttggggctttataccttggtggttaatggtaaggactctgagagagtccaatctttcgatttgttagaaagcatattttatgttttcaatactggtttcatcttggatgagctcactaagctttattatattggttatgcgcacttgagtttttggaatttatttaatgataccacatatttgataatcacgtttgctatggggttccgtgcaatgagcgtaacgccccttaatgcaaaatactcttctgaagattgggataaaatatcttatagagtcttatcctgtgcagcaccatttgtgtggtccagactccttttataccttgaatctcaaaggtttattgggattatgttggttatcttgaaacatatgatgaaagaatccattgtatttttcttccttttattcttaataatgataggattcactcaaggtttcttaggtttggattccgcagatggtaagagagatatcaccggacccatcttgggtaatttaacaatcaccgttttgggtcttggtagttttgatgttttcgaagaattcgctcccccatatgcggcaatactttattatggttactattttattgtttctgttatccttttgaatatattaattgctttgtattctactgcgtaccaaaaagttattgacaatgcagatgacgagtacatggctttgatgtctcaaaagacgttgagatacattagagcacctgatgaagatgtctatgtttctccattgaacttaattgaagtgttcatgacacctatctttcgtattcttccaccgaagcgtgctaaagatttgagctatactgtaatgacaatagtgtacagcccatttttgttgcttatttctgttaaagaaactagggaggctagaaggataaaatataacaggatgaaaaggttaaacgatgatgccaatgaatatgatactccatgggatttgacagatggctacttggatgatgatgacggtttgttttctgataacagaaattctggcatgagagccacccagttaaagaattcccgttctttgaaattacaaagaacagcagagcaggaagatgtccattttaaagtccctaagaagtggtataaaaacgttaaaaaatgcagtccctccttcgaacagtatgataacgatgacactgaagatgatgctggtgaagataaagatgaagtcaaagagctcactaagaaagtggaaaacttgacagctgtaattaccgatttactcgaaaaattagacataaaggataagaaagagtga

SEQ ID NO: 10307 - DNA, 633 bp, Saccharomyces cerevisiae
atgaacacatcagtcacttccataaagttggtactgttgggtgaggcagcagttggtaaatcgtcaatagtcctaaggtttgtatctaatgattttgccgaaaataaggagcccaccattggtgcagcattcctcactcaaagagttactataaatgaacatactgttaagtttgaaatatgggacactgctgggcaagagagatttgcatctttagcacctatgtactatagaaacgcacaagctgctcttgtagtatacgacgttacaaaaccacaatcctttattaaagcgcgccactgggttaaggaattacatgaacaggcatcaaaggatatcatcattgcgttagttggtaacaagatcgatatgctgcaagaaggtggggaaagaaaagtcgcaagggaagaaggtgaaaagctagcggaagaaaagggcttgttgttctttgaaacaagtgcaaagacaggagagaatgttaacgatgtatttttgggaatcggtgaaaagataccactgaagacggctgaagagcaaaatagtgcaagtaacgaacgtgagtcgaacaatcaaagagtggatttgaacgctgctaatgatgggaccagcgcaaacagtgcttgcagttgttag

SEQ ID NO: 10308 - DNA, 633 bp, Artificial Sequence
  Description of Artificial Sequence: Synthetic polynucleotide
atgaacacatctgtcacttccataaagttggtacttttgggtgaggcagcagttggtaaatcttctatagtcttgaggtttgtatctaatgattttgccgaaaataaggagcccaccattggtgcagcattcctcactcaaagagttactataaatgaacatactgttaagtttgaaatatgggacactgctgggcaagagagatttgcatctttagcacctatgtactatagaaacgcacaagctgctcttgtagtatacgacgttacaaaaccacaatcctttattaaagcgcgccactgggttaaggaattacatgaacaggcatccaaggatatcatcattgcgttagttggtaacaagatcgatatgttacaagaaggtggggaaagaaaagtcgcaagggaagaaggtgaaaagttggcggaagaaaagggcttgttgttctttgaaacaagtgcaaagacaggagagaatgttaacgatgtatttttgggaatcggtgaaaagataccattgaagacggctgaagagcaaaatagtgcaagtaacgaacgtgagagcaacaatcaaagagtggatttgaacgctgctaatgatgggaccagcgcaaacagtgcttgcagttgttga

SEQ ID NO: 10309 - DNA, 1719 bp, Saccharomyces cerevisiae
atgtctcccttaactagaaccgtagctataaagaaaacggttaaggttctatctaaatgtcaatctggtagagaatacacacagaagtttctccaacgtgcatattcaacatcacatgccaacagcacatactattcaaggacaaagctattcatatcatcacattctaaagctctaaacattgctctactaagcgggtccctactgttgacctactcctactattcccctaaaaagatcctctcccttgatacaattaacggaataaaagattattctacaaatactagtggtaacattaacatgccgtcacctaatccaaaaggaacagagacacaaaagagtcaacggtctcagaatgaccaatctgttcttatcttgaacgattctaaaatagaggctaaactacatgatagagaggaaagccattttgttaaccgtggcactggtatattcaggtatgatgtggcacagttgccctctaaccatccaatagaagacgatcacgtagaacaaatcattaccattccgatagaaagtgaggatggcaagtccatagagaaggatttgtatttttttggaatttttgatggacatggtggtcctttcacttcggaaaaattatctaaagatctagtccgttatgtagcgtatcaattaggtcaggtatatgaccagaacaaaacggttttccattccgaccccaaccaattaatcgattctgcaatttcgaaaggttttttgaaactagataatgatcttgtaatcgaatcgttcaggaagctgtttcaagatccaaacaacacaaatattgcaaacactttaccagcgatttctggttcttgtgcactattaagtttatacaactccactaactcaattttgaaagtggctgtcactggagactcaagggctttaatttgtggtttggacaacgagggcaattggacggtaaagtcgctatccaccgaccagaccggtgataatttggatgaagtacggagaattaggaaagaacatccaggagaaccaaacgttataagaaacggaagaatattgggttcattacaaccatccagggcatttggagactatcgctacaagatcaaagaagtcgatggaaaaccattatcggatttgcctgaagttgccaaactttattttagaagagagccaagggatttcaagacacccccatatgtcactgcggaaccagtgattacttctgccaaaattggtgagaacactaaatttatggtgatgggttcggatggtttattcgaattactaactaatgaagaaattgcttccttggttatcaggtggatggataaaaatatgaatctggcacctgtgaaggcagaaccggggaaattaccaaaagttatcgatgtatctgaagacaaggaagcacaaagaccggcattcaggtacaaggataataattcgagctcaccatcaggatcaaacccagagtatcttattgaagacaaaaacgtcgccactcatttaattagaaatgcattaagtgcgggcggaagaaaagaatatgtatcggcattggtaagtataccatcgccgatgagtagaagatacagagatgacttgacagtaacagtggcgttctttggtgattctggaacaccctcaattgtctccaatgctacttcaatagttatgaacccggaggcaacaacaaagccaaaacctagattatga

SEQ ID NO: 10310 - DNA, 1719 bp, Artificial Sequence
  Description of Artificial Sequence: Synthetic polynucleotide
atgtctcccttaactagaaccgtagctataaagaaaacggttaaggttttatctaaatgtcaatctggtagagaatacacacagaagtttctccaacgtgcatattctacatctcatgccaacagcacatactattctaggacaaagcttttcatatcttctcattctaaagctttgaacattgctttgttgagcgggtccttattattgacctactcctactattcccctaaaaagatcctctcccttgatacaattaacggaataaaagattattctacaaatactagtggtaacattaacatgccgtctcctaatccaaaaggaacagagacacaaaagagtcaaagatctcagaatgaccaatctgttcttatcttgaacgattctaaaatagaggctaaattgcatgatagagaggaaagccattttgttaaccgtggcactggtatattcaggtatgatgtggcacagttgccctctaaccatccaatagaagacgatcacgtagaacaaatcattaccattccgatagaaagtgaggatggcaagtccatagagaaggatttgtatttttttggaatttttgatggacatggtggtcctttcacttctgaaaaattatctaaagatttggtccgttatgtagcgtatcaattaggtcaggtatatgaccagaacaaaacggttttccattccgaccccaaccaattaatcgattctgcaatttccaaaggttttttgaaattggataatgatcttgtaatcgaatctttcaggaagttatttcaagatccaaacaacacaaatattgcaaacactttaccagcgatttctggttcttgtgcattattaagtttatacaactccactaactctattttgaaagtggctgtcactggagacagcagggctttaatttgtggtttggacaacgagggcaattggacggtaaagtctttatccaccgaccagaccggtgataatttggatgaagtaagaagaattaggaaagaacatccaggagaaccaaacgttataagaaacggaagaatattgggttctttacaaccatccagggcatttggagactatcgctacaagatcaaagaagtcgatggaaaaccattaagtgatttgcctgaagttgccaaactttattttagaagagagccaagggatttcaagacacccccatatgtcactgcggaaccagtgattacttctgccaaaattggtgagaacactaaatttatggtgatgggttctgatggtttattcgaattattaactaatgaagaaattgcttccttggttatcaggtggatggataaaaatatgaatttggcacctgtgaaggcagaaccggggaaattaccaaaagttatcgatgtatctgaagacaaggaagcacaaagaccggcattcaggtacaaggataataatagtagctctccatctggaagtaacccagagtatcttattgaagacaaaaacgtcgccactcatttaattagaaatgcattaagtgcgggcggaagaaaagaatatgtatctgcattggtaagtataccatctccgatgagtagaagatacagagatgacttgacagtaacagtggcgttctttggtgattctggaacaccctctattgtctccaatgctacttccatagttatgaacccggaggcaacaacaaagccaaaacctagattatga

SEQ ID NO: 10311 - DNA, 1038 bp, Saccharomyces cerevisiae
atgccaccaaaaaagggaaaacaggcccaagcggctggtaagaagaaggataatgtcgacaagacgttcggtatgaagaacaagaaccgttctaccaaagtccaaaaatacatcaaacaagtgcaatcacaatccgaccccaagaaagaagagatgaggttaaagaaactcgaagaaaaaaagcgcagagaagccgaagaagctgaacgaagagcactattcaaccctgtagcagaccaaagggttcgtgcgggtgtagatcccaagtccatggtttgtgctctgttcaaactggggaattgtaacaaaggtgccaaatgtaagttctcacatgacttgaacgtcggtagaagaatggaaaagaaagatttataccaagatacaagaagtgaaaaggaaaatgacacaatggacaactgggatgaagaaaagctgagaaaagttatcctgtcgaagcacggtaacccaaagaccaccaccgacaaagtatgcaaatacttcatcgaggccgtggaaaacggtaaatacggttggttttggatttgtcctaacggaggtgacaaatgtatgtacagacactccctaccagagggctttgtgctgaaaaccaacgagcaaaagaggctcgagagggagtcgctcgagaaacagccaaaaattacgctggaggagtttatcgaaacagaaagagggaaactagacaaatccaagctaacaccaataacaattgccaacttcgcccaatggaagaaggaccacgtcatcgcaaagattaacgctgaaaagaagttatctagtaagaggaaacctactggtagagaaatcattcttaagatgagcgccgaaaacaagtcatttgagacggacaacgccgacatgccagacgacgtcacccagggatccgcatgggatcttactgaattcacagatgccttgaagaaggctgaccaccaagacgacggcggcatcaaggactacggtgacggtagcaaccccaccttcgacatcaaaaaagccaactccgccacgctcgcatag

SEQ ID NO: 10312 - DNA, 1038 bp, Artificial Sequence
  Description of Artificial Sequence: Synthetic polynucleotide
atgccaccaaaaaagggaaaacaggcccaagcggctggtaagaagaaggataatgtcgacaagacgttcggtatgaagaacaagaaccgttctaccaaagtccaaaaatacatcaaacaagtgcaatctcaatccgaccccaagaaagaagagatgaggttaaagaaactcgaagaaaaaaagcgcagagaagccgaagaagctgaaagaagagcattattcaaccctgtagcagaccaaagggttcgtgcgggtgtagatcccaagtccatggtttgtgctttattcaaattggggaattgtaacaaaggtgccaaatgtaagttctctcatgacttgaacgtcggtagaagaatggaaaagaaagatttataccaagatacaagaagtgaaaaggaaaatgacacaatggacaactgggatgaagaaaagttgagaaaagttatcttatccaagcacggtaacccaaagaccaccaccgacaaagtatgcaaatacttcatcgaggccgtggaaaacggtaaatacggttggttttggatttgtcctaacggaggtgacaaatgtatgtacagacactccttgccagagggctttgtgttgaaaaccaacgagcaaaagaggctcgagagggagtctctcgagaaacagccaaaaattacgttggaggagtttatcgaaacagaaagagggaaattagacaaatccaagttaacaccaataacaattgccaacttcgcccaatggaagaaggaccacgtcatcgcaaagattaacgctgaaaagaagttatctagtaagaggaaacctactggtagagaaatcattcttaagatgagcgccgaaaacaagagctttgagacggacaacgccgacatgccagacgacgtcacccagggatccgcatgggatcttactgaattcacagatgccttgaagaaggctgaccaccaagacgacggcggcatcaaggactacggtgacggtagcaaccccaccttcgacatcaaaaaagccaactccgccacgctcgcatga

SEQ ID NO: 10313 - DNA, 1842 bp, Saccharomyces cerevisiae
atgacacacatcacactgggacaagccatctgggcctctgtcagaccaatcatcaaaatctatctgattattggtgtaggcttcggtttatgcaagatgaacatcttaaccgttcaggccacaaggtccatctctgatatcgttttaacaattctgcttccttgtttatcattcaataaaatcgtagcaaatatagaagataacgatatcaaagatgtcggcattatttgtctgacgtctgttatactgttcgcaactggcttggggtttgcctttattgttcgcagtgtgctgcctgttcctaagagatggcgtggtggtatacttgcaggaggtatgtttcccaatatcagcgatctacccatcgcctatttgcaatccatggaccaagggtttatatttacagaagcagaaggtgagaaaggtgttgccaacgttatcatctttctggccatgtttttgatatgtgttttcaatttaggtggtttcagactaattgaaaacgatttccattacaaaggtgatgacgatgaagaaaatacgttgaccaatgatgattctgcccaacagccaacacaaccaattgaaggcaattcttcttcttcatccaaccaagatatcctgaaagagcccaacgagtctaccgttcctaacagttcacaagcaagctacatttctgagaaaaataaaaaagaaaaaactgaactctctgtccccaagcctacacatactgcccctccagcaatagatgacaggagctcgaactcatccgcggtggtctctatcgatagcattacacactcactacgcacaaaccatgtggatgcccaatctgtaagcgagcttaacgatcctacttacagaactagaagtcaaccaatagcatacactaccgagtcaagaacatcacatgttcataataaccgcaggaattccatcactggctccttacgttccatcgatatgcgtgaactacccgcggaaggcatgtcggatttaattcgtgaatactccaatgttgatcaatacggtagaagaaggaaaagttctatcagctcccaaggagcaccctctgttttgcaggcagacggtactatttctccaaatttgactagaacctccactttacaaagagtcaaaacttccaacctaacaagaataatcacctcagatgccactgttagtaagaaagatattgagacttccggttcctctttaccaaaatggctacagaaatttcccttaacaaaatttttcgtcttttttctaaaaaattgtctaaggccttgttccatggctgttatcctggctttgattatcgcttttattccctgggtaaaagcccttttcgttacgaccagtaatacaccaaaaatcaaacaagccccagataatgcacctgctctaactttcattatggattttacatcttatgttggagccgcttcagttcccttcggtttgattcttttaggcgctactcttggtagattgaaaattggaaaattataccctggtttctggaaatccgcagtggtattagtctttctcagacaatgtatcatgccgatctttggtgtcttgtggtgtgaccgtctagtgaaagcgggatggctaaattgggaaaacgacaagatgttattgtttgttaccgccattacttggaacttaccaacaatgaccaccttaatctacttcactgcaagttatacccctgaggacgaaactgaacccgttcaaatggaatgtacctctttctttttgatgcttcaatatcctttgatggtcgttagtttaccatttttggtgtcttatttcatcaaagttcaaatgaaattataa

SEQ ID NO: 10314 - DNA, 1842 bp, Artificial Sequence
  Description of Artificial Sequence: Synthetic polynucleotide
atgacacacatcacattaggacaagccatctgggcctctgtcagaccaatcatcaaaatctatttgattattggtgtaggcttcggtttatgcaagatgaacatcttaaccgttcaggccacaaggtccatctctgatatcgttttaacaattttacttccttgtttatctttcaataaaatcgtagcaaatatagaagataacgatatcaaagatgtcggcattatttgtttgacgtctgttatattattcgcaactggcttggggtttgcctttattgttcgcagtgtgttgcctgttcctaagagatggcgtggtggtatacttgcaggaggtatgtttcccaatatcagcgatttgcccatcgcctatttgcaatccatggaccaagggtttatatttacagaagcagaaggtgagaaaggtgttgccaacgttatcatctttttggccatgtttttgatatgtgttttcaatttaggtggtttcagattgattgaaaacgatttccattacaaaggtgatgacgatgaagaaaatacgttgaccaatgatgattctgcccaacagccaacacaaccaattgaaggcaattcttcttcttcttccaaccaagatatcttgaaagagcccaacgagtctaccgttcctaacagttctcaagcaagctacatttctgagaaaaataaaaaagaaaaaactgaactctctgtccccaagcctacacatactgcccctccagcaatagatgacaggagcagtaactcttccgcggtggtctctatcgatagcattacacactctttacgcacaaaccatgtggatgcccaatctgtaagcgagcttaacgatcctacttacagaactagaagtcaaccaatagcatacactaccgagagcagaacatctcatgttcataataaccgcaggaattccatcactggctccttacgttccatcgatatgcgtgaattgcccgcggaaggcatgagtgatttaattcgtgaatactccaatgttgatcaatacggtagaagaaggaaaagttctatcagctcccaaggagcaccctctgttttgcaggcagacggtactatttctccaaatttgactagaacctccactttacaaagagtcaaaacttccaacttaacaagaataatcacctctgatgccactgttagtaagaaagatattgagacttccggttcctctttaccaaaatggttacagaaatttcccttaacaaaatttttcgtcttttttttgaaaaattgtttgaggccttgttccatggctgttatcttggctttgattatcgcttttattccctgggtaaaagcccttttcgttacgaccagtaatacaccaaaaatcaaacaagccccagataatgcacctgctttgactttcattatggattttacatcttatgttggagccgcttctgttcccttcggtttgattcttttaggcgctactcttggtagattgaaaattggaaaattataccctggtttctggaaatccgcagtggtattagtctttctcagacaatgtatcatgccgatctttggtgtcttgtggtgtgaccgtttagtgaaagcgggatggttaaattgggaaaacgacaagatgttattgtttgttaccgccattacttggaacttaccaacaatgaccaccttaatctacttcactgcaagttatacccctgaggacgaaactgaacccgttcaaatggaatgtacctctttctttttgatgcttcaatatcctttgatggtcgttagtttaccatttttggtgtcttatttcatcaaagttcaaatgaaattatga

SEQ ID NO: 10315 - DNA, 4947 bp, Saccharomyces cerevisiae
atggatttttctattcctcctaccttacctctagatctgcaaagtcggttaaatgagttaattcaagactataaggatgaaaatctaacaagaaagggttatgagaccaaaagaaaacaattgctagacaaatttgaaatctcccaaatgaggccttataccccgcttcgatctcccaattcgagaaagtcgaaacatttgcacagaagaaatacaagtcttgcatcatccattacgtcgttacctaattcaattgacagacgtcattctatctatcgtgtcacaactataaactcgacttctgcgaacaatactcccagaaggcggagcaagagatatacagcttctttgcaatcgtcattgccaggttccagtgatgaaaacggttcagtgaaggatgccgtttataatcctatgataccattactaccaagacacactggagccgaaaatactagcagtggagactcagcaatgacggattctttaccgctaattttacggggacgctttgaacattatgatggtcaaacagcgatgatcagcataaattctaaaggcaaagaaacgttcatcacatgggataaactttatttgaaagcggagagggtagcacatgaattgaataagagtcacctttacaaaatggataagattttactatggtacaataaaaatgatgtcatcgaatttactattgcattattaggctgtttcatatccggcatggcagctgtaccagtctcattcgaaacgtattctctgcgtgagatccttgagataattaaagtaacaaattcgaaatttgttctgatttctaacgcatgtcatagacaattagataacttgtattcgtcatcaaatcattcaaaagttaaactggttaagaacgatgttttccagcaaatcaaatttgtcaagactgatgacttagggacgtacacaaaggcaaaaaaaacttcgcctacctttgatataccgaatatttcatatatagagtttactagaacaccgctaggtcgtctttctggcgtcgtcatgaagcataacatcttaataaaccaatttgaaacgatgacaaaaattctaaactcacgatcaatgcctcactggaaacaaaaatcacaaagcatcaggaagccatttcacaaaaaaattatggcaaccaactcaaggtttgttatcttgaatagtctggaccctactagatctactggtttgataatgggtgtgcttttcaatctttttactggtaatcttatgatatctatcgatagtagtatattacaacgacctgggggctatgaaaatatcattgataaatttagagccgacattttactgaatgatcagctacaattgaagcaggtagttattaattatttggaaaatcccgaatcagctttttccaagaagcacaaaatagatttcagttgcatcaagtcatgtttaacctcatgtaccactatagataccgatgtaagcgagatggttgttcataaatggctgaaaaatttaggatgtattgatgcaccattttgttattctcccatgttaacgttattggactttggtggtatctttatatctataagagatcaattaggaaacctagagaactttccaatacataattcaaaactaaggcttcaaaatgaattgtttataaaccgcgagaaattgaagcttaatgaggttgaatgtagcataactgctatgattaattcatcaagctccttcaaagattatcttaaattagaaacatttggcttcccaattcctgatatcactttatgtgtggttaatccagatacgaatacgttggtgcaagacctcactgttggagaaatatggatctcttctaaccacatcaccgacgaattttaccagatggataaagtgaacgaatttgtgttcaaagcaaaactaaattactccgaaatgttttcttgggcaaagtatgaaatgcctactaacgaaaaatcgcaagcagttactgaacaattggataccattctgaatatttgtcctgcaaatacctactttatgagaaccaagcttatggggtttgttcataacggaaagatatacgtgctttcactcatagaagatatgtttttacagaatagattaatcagattacctaactgggctcacacatcaaaccttctttatgccaaaaaagggaatcaatctgctcaacctaaaggtaacactggagcagaaagcactaaggctattgatatttcgagtttaagtggcgaaacatcttcgggatacaaaagagttgttgaatcccactatctacaacagattactgaaacagttgtgaggacagtaaatacagtttttgaggttgctgcatttgaattacaacaccataaagaagagcactttttagttatggtggtagaaagctccctagcaaaaaccgaagaagagagtaaaaatggcgaaacaacagatactaccttaatgaaatttgcagaaacacagaggaacaaattagaaacgaaaatgaatgatttaactgaccaaatttttagaattctttggatttttcataaaatccaaccaatgtgcattttagttgtgccgagagatactttacctaggagatattgttctctggaattggccaatagcacggtagagaagaagtttttaaacaatgatctcagtgcacagtttgtaaagtttcaattcgataatgtcatattggattttttgccccattcagcgtactataatgagagtatattatccgagcatttatcaaaattgagaaagatggctttacaagaagaatacgctatgatcgaaccagcatatcgtaatggcggtcccgttaaaccaaaacttgccctacaatgcagtggtgttgattacagagatgagtctgttgacactcgaagccatacaaaactcacagacttcaaatcgattttagagattctggaatggagaatttctaattatgggaacgaaacggcgttcagtgatggtacaaacacaaacctagtcaactcttcagctagtaacgataataacgttcacaaaaaggtatcatgggcaagttttggtaaaattgtcgcaggctttttgaaaaaaatcgtaggttctaaaattccattgaagcatggtgaccctattattattatgtgtgaaaattcggttgaatacgtagcgatgatcatggcctgcctgtactgtaacttattggtaattcccctaccaagcgttaaggagtctgtcatagaagaggacctaaaaggcttggttaatattattcaaagttacaaagtgaaaagagtatttgttgatgctaaattgcactcattgttgaatgataataatgtcgtaaacaaatgttttaagaaatacaaaagtttgatacccaagattacagttttctcaaaagtcaagacaaagaatgcgttaacagtatctatgtttaagaatgtgttaaagcagaaatttggggccaaaccaggtactaggattggtatgacaccgtgtgttgtatgggtaaatacagagtatgatgtaacatctaatattcacgtaacaatgacacattcgtctttactgaatgcaagcaaaatagtcaaagaaactttgcagttaagaaataatagtccacttttctctatatgttctcatacatctggattgggctttatgttcagctgtttgttaggaatttatacgggtgcttcaacttgcttattcagccttactgatgttcttactgaccctaaggagtttttaattggccttcaaaatttaaacgtaaaagatttatatttgaagcttgaaacgttatatgctttactggatagagcctctagtttgattgagggattcaaaaataagaaggagaatataaactctgccaaaaacaatacatctggctcgcttagagaagatgttttcaagggtgttcgaaatatcatgataccttttcctaatagaccaaggatttatacaattgaaaatattttaaaacggtactcaaccatatccctatcatgtacacaaataagttatgtctatcaacatcacttcaatccgcttatatcattaaggtcgtatctggatattcctccggttgacctatatttagacccattttcactgagggaaggtataattagagaagtcaaccccaatgatgtaagtgctggaaactatatcaagattcaagattctggtgttgttcctgtatgtactgacgtttcagtagttaatccagagacactcctaccatgtgttgatggagaattcggtgagatttggtgctgttcggaagctaatgcattcgactactttgtgtgtaacagttcaaaaaacaagttgtacaaagatccctttatcacagaacaattcaaaagtaagatgaagagcgaagtgaataacactttaagctatttgagaactggtgatctgggctttatcaaaaacgtaagttgcacgaattcacagggagaggtcgtcaatttgaacttgttgtttgttttgggaagtattcatgaatccattgaaattctaggattgacacattttgttagtgatttggagagaaccgttaaagatgttcacagtgacattggtagttgtttgattgccaaagcaggtggattattagtgtgcttaattaggtgtaaggaacgacataatcccatcttgggtaatctaacgactttaattgtttcagagttgttaaataagcatggtgtcattttagatttatgcacatttgtgagaactaaaggtataagcccaaaaaattctagtatgataatggaagtttgggcgaaaaatagagcatcgataatgcaagcctggtttgatcagaaaattcaaatagaagcacaatttggcataaactatggtgaaaatatttccatttatttattatcagattatgaaaaggacaatatttaa

SEQ ID NO: 10316 - DNA, 4947 bp, Artificial Sequence
  Description of Artificial Sequence: Synthetic polynucleotide
atggatttttctattcctcctaccttacctttggatttgcaaagtaggttaaatgagttaattcaagactataaggatgaaaatttgacaagaaagggttatgagaccaaaagaaaacaattgttggacaaatttgaaatctcccaaatgaggccttataccccgcttagatctcccaattctagaaagagtaaacatttgcacagaagaaatacaagtcttgcatcttccattacgtctttacctaattctattgacagacgtcattctatctatcgtgtcacaactataaactctacttctgcgaacaatactcccagaaggagaagcaagagatatacagcttctttgcaatcttctttgccaggttccagtgatgaaaacggttctgtgaaggatgccgtttataatcctatgataccattattaccaagacacactggagccgaaaatactagcagtggagactctgcaatgacggattctttaccgttgattttaagaggacgctttgaacattatgatggtcaaacagcgatgatcagcataaattctaaaggcaaagaaacgttcatcacatgggataaactttatttgaaagcggagagggtagcacatgaattgaataagagtcacctttacaaaatggataagattttattatggtacaataaaaatgatgtcatcgaatttactattgcattattaggctgtttcatatccggcatggcagctgtaccagtctctttcgaaacgtattctttacgtgagatccttgagataattaaagtaacaaattctaaatttgttttgatttctaacgcatgtcatagacaattagataacttgtattcttcttccaatcattctaaagttaaattggttaagaacgatgttttccagcaaatcaaatttgtcaagactgatgacttagggacgtacacaaaggcaaaaaaaacttctcctacctttgatataccgaatatttcttatatagagtttactagaacaccgttgggtcgtctttctggcgtcgtcatgaagcataacatcttaataaaccaatttgaaacgatgacaaaaattttgaactctagaagtatgcctcactggaaacaaaaatctcaaagcatcaggaagccatttcacaaaaaaattatggcaaccaacagcaggtttgttatcttgaatagtttggaccctactagatctactggtttgataatgggtgtgcttttcaatctttttactggtaatcttatgatatctatcgatagtagtatattacaaagacctgggggctatgaaaatatcattgataaatttagagccgacattttattgaatgatcagttacaattgaagcaggtagttattaattatttggaaaatcccgaatctgctttttccaagaagcacaaaatagatttcagttgcatcaagagttgtttaacctcttgtaccactatagataccgatgtaagcgagatggttgttcataaatggttgaaaaatttaggatgtattgatgcaccattttgttattctcccatgttaacgttattggactttggtggtatctttatatctataagagatcaattaggaaacttggagaactttccaatacataattctaaattgaggcttcaaaatgaattgtttataaaccgcgagaaattgaagcttaatgaggttgaatgtagcataactgctatgattaattcttctagctccttcaaagattatcttaaattagaaacatttggcttcccaattcctgatatcactttatgtgtggttaatccagatacgaatacgttggtgcaagacctcactgttggagaaatatggatctcttctaaccacatcaccgacgaattttaccagatggataaagtgaacgaatttgtgttcaaagcaaaattgaattactccgaaatgttttcttgggcaaagtatgaaatgcctactaacgaaaaatctcaagcagttactgaacaattggataccattttgaatatttgtcctgcaaatacctactttatgagaaccaagcttatggggtttgttcataacggaaagatatacgtgctttctctcatagaagatatgtttttacagaatagattaatcagattacctaactgggctcacacaagtaaccttctttatgccaaaaaagggaatcaatctgctcaacctaaaggtaacactggagcagaaagcactaaggctattgatatttccagtttaagtggcgaaacatcttctggatacaaaagagttgttgaatcccactatttacaacagattactgaaacagttgtgaggacagtaaatacagtttttgaggttgctgcatttgaattacaacaccataaagaagagcactttttagttatggtggtagaaagctccttggcaaaaaccgaagaagagagtaaaaatggcgaaacaacagatactaccttaatgaaatttgcagaaacacagaggaacaaattagaaacgaaaatgaatgatttaactgaccaaatttttagaattctttggatttttcataaaatccaaccaatgtgcattttagttgtgccgagagatactttacctaggagatattgttctttggaattggccaatagcacggtagagaagaagtttttaaacaatgatctcagtgcacagtttgtaaagtttcaattcgataatgtcatattggattttttgccccattctgcgtactataatgagagtatattatccgagcatttatccaaattgagaaagatggctttacaagaagaatacgctatgatcgaaccagcatatcgtaatggcggtcccgttaaaccaaaacttgccttgcaatgcagtggtgttgattacagagatgagtctgttgacactagaagccatacaaaactcacagacttcaaatccattttagagattttggaatggagaatttctaattatgggaacgaaacggcgttcagtgatggtacaaacacaaacttggtcaactcttctgctagtaacgataataacgttcacaaaaaggtaagctgggcaagttttggtaaaattgtcgcaggctttttgaaaaaaatcgtaggttctaaaattccattgaagcatggtgaccctattattattatgtgtgaaaattctgttgaatacgtagcgatgatcatggcctgcttatactgtaacttattggtaattcccttaccaagcgttaaggagtctgtcatagaagaggacttgaaaggcttggttaatattattcaaagttacaaagtgaaaagagtatttgttgatgctaaattgcactctttgttgaatgataataatgtcgtaaacaaatgttttaagaaatacaaaagtttgatacccaagattacagttttctccaaagtcaagacaaagaatgcgttaacagtatctatgtttaagaatgtgttaaagcagaaatttggggccaaaccaggtactaggattggtatgacaccgtgtgttgtatgggtaaatacagagtatgatgtaacatctaatattcacgtaacaatgacacattcttctttattgaatgcaagcaaaatagtcaaagaaactttgcagttaagaaataatagtccacttttctctatatgttctcatacatctggattgggctttatgttcagctgtttgttaggaatttatacgggtgcttccacttgcttattcagccttactgatgttcttactgaccctaaggagtttttaattggccttcaaaatttaaacgtaaaagatttatatttgaagcttgaaacgttatatgctttattagatagagcctctagtttgattgagggattcaaaaataagaaggagaatataaactctgccaaaaacaatacatctggctctcttagagaagatgttttcaagggtgttagaaatatcatgataccttttcctaatagaccaaggatttatacaattgaaaatattttaaaaagatactctaccatatccttaagttgtacacaaataagttatgtctatcaacatcacttcaatccgcttatatctttaaggagttatttggatattcctccggttgacctttatttagacccattttctttgagggaaggtataattagagaagtcaaccccaatgatgtaagtgctggaaactatatcaagattcaagattctggtgttgttcctgtatgtactgacgtttctgtagttaatccagagacactcttaccatgtgttgatggagaattcggtgagatttggtgctgttctgaagctaatgcattcgactactttgtgtgtaacagttctaaaaacaagttgtacaaagatccctttatcacagaacaattcaaaagtaagatgaagagcgaagtgaataacactttaagctatttgagaactggtgatttgggctttatcaaaaacgtaagttgcacgaattctcagggagaggtcgtcaatttgaacttgttgtttgttttgggaagtattcatgaatccattgaaattttaggattgacacattttgttagtgatttggagagaaccgttaaagatgttcacagtgacattggtagttgtttgattgccaaagcaggtggattattagtgtgcttaattaggtgtaaggaaagacataatcccatcttgggtaatttaacgactttaattgtttctgagttgttaaataagcatggtgtcattttagatttatgcacatttgtgagaactaaaggtataagcccaaaaaattctagtatgataatggaagtttgggcgaaaaatagagcatctataatgcaagcctggtttgatcagaaaattcaaatagaagcacaatttggcataaactatggtgaaaatatttccatttatttattaagtgattatgaaaaggacaatatttga

SEQ ID NO: 10317 - DNA, 552 bp, Saccharomyces cerevisiae
atgggcaattcaatttcgaaggttctgggaaaactatttggctcgaaagaaatgaaaattttgatgctaggcctggataaggctggtaagacaacaatattgtacaaactaaaattaaataaaataaagacgtctactcccactgtcggttttaacgtggaaaccgttacttataaaaacgtaaaattcaacatgtgggatgtaggaggacaacaaagattgagacctctctggagacattattttccagccaccaccgcacttatctttgtgatagattctagtgctagaaaccgtatggaagaggccaaagaagagttatatagtatcataggtgagaaagagatggagaatgtagtactgctggtatgggcaaacaaacaagatttgaaagatgcaatgaaacctcaagaggtttccgattttttagaactggagaaaaatttgaaaaaccaaccttggtgtgtcatcggtagtaacgccttatccggacagggtcttgttgaaggattatcctggatttcgaacaacacaaacgttccaaagaaataa

SEQ ID NO: 10318 - DNA, 552 bp, Artificial Sequence
  Description of Artificial Sequence: Synthetic polynucleotide
atgggcaattctatttccaaggttttaggaaaattatttggctctaaagaaatgaaaattttgatgcttggcttggataaggctggtaagacaacaatattgtacaaattgaaattaaataaaataaagacgtctactcccactgtcggttttaacgtggaaaccgttacttataaaaacgtaaaattcaacatgtgggatgtaggaggacaacaaagattgagacctctctggagacattattttccagccaccaccgcacttatctttgtgatagattctagtgctagaaaccgtatggaagaggccaaagaagagttatatagtatcataggtgagaaagagatggagaatgtagtattgttagtatgggcaaacaaacaagatttgaaagatgcaatgaaacctcaagaggtttccgattttttagaattagagaaaaatttgaaaaaccaaccttggtgtgtcatcggtagtaacgccttatccggacagggtcttgttgaaggattatcctggatttccaacaacacaaacgttccaaagaaatga

SEQ ID NO: 10319 - DNA, 777 bp, Saccharomyces cerevisiae
atggctgccggtgtcccaaaaattgatgcgttagaatctttgggcaatcctttggaggatgccaagagagctgcagcatacagagcagttgatgaaaatttaaaatttgatgatcacaaaattattggaattggtagtggtagcacagtggtttatgttgccgaaagaattggacaatatttgcatgaccctaaattttatgaagtagcgtctaaattcatttgcattccaacaggattccaatcaagaaacttgattttggataacaagttgcaattaggctccattgaacagtatcctcgcattgatatagcgtttgacggtgctgatgaagtggatgagaatttacaattaattaaaggtggtggtgcttgtctatttcaagaaaaattggttagtactagtgctaaaaccttcattgtcgttgctgattcaagaaaaaagtcaccaaaacatttaggtaagaactggaggcaaggtgttcccattgaaattgtaccttcctcatacgtgagggtcaagaatgatctattagaacaattgcatgctgaaaaagttgacatcagacaaggaggttctgctaaagcaggtcctgttgtaactgacaataataacttcattatcgatgcggatttcggtgaaatttccgatccaagaaaattgcatagagaaatcaaactgttagtgggcgtggtggaaacaggtttattcatcgacaacgcttcaaaagcctacttcggtaattctgacggtagtgttgaagttaccgaaaagtga

SEQ ID NO: 10320 - DNA, 777 bp, Artificial Sequence
  Description of Artificial Sequence: Synthetic polynucleotide
atggctgccggtgtcccaaaaattgatgcgttagaatctttgggcaatcctttggaggatgccaagagagctgcagcatacagagcagttgatgaaaatttaaaatttgatgatcacaaaattattggaattggtagtggtagcacagtggtttatgttgccgaaagaattggacaatatttgcatgaccctaaattttatgaagtagcgtctaaattcatttgcattccaacaggattccaatctagaaacttgattttggataacaagttgcaattaggctccattgaacagtatcctcgcattgatatagcgtttgacggtgctgatgaagtggatgagaatttacaattaattaaaggtggtggtgcttgtttatttcaagaaaaattggttagtactagtgctaaaaccttcattgtcgttgctgattccagaaaaaagtctccaaaacatttaggtaagaactggaggcaaggtgttcccattgaaattgtaccttcctcttacgtgagggtcaagaatgatttattagaacaattgcatgctgaaaaagttgacatcagacaaggaggttctgctaaagcaggtcctgttgtaactgacaataataacttcattatcgatgcggatttcggtgaaatttccgatccaagaaaattgcatagagaaatcaaattattagtgggcgtggtggaaacaggtttattcatcgacaacgcttccaaagcctacttcggtaattctgacggtagtgttgaagttaccgaaaagtga

SEQ ID NO: 10321 - DNA, 573 bp, Saccharomyces cerevisiae
atgtctgctccacaagccaagattttgtctcaagctccaactgaattggaattacaagttgctcaagctttcgttgaattggaaaattcttctccagaattgaaagctgagttgagacctttgcaattcaagtccatcagagaaatcgacgttgctggtggtaagaaggctttggccatttttgttccagtcccatctttggctggtttccacaaggttcaaactaagttgacccgtgaattggaaaagaaattccaagaccgtcatgtcatcttcttggctgaaagaagaatcttgccaaagccatctagaacatctagacaagtccaaaagagaccaagatccagaaccttgactgctgttcatgacaagatcttggaagacttagtcttcccaactgaaatcgttggtaagagagttagatatttggttggtggtaacaagatccaaaaggttttgttagactcaaaggatgtccaacaaatcgactacaaattggaatctttccaagctgtttacaacaaattgactggtaagcaaattgttttcgaaattccaagtgaaactcattag

SEQ ID NO: 10322 - DNA, 573 bp, Artificial Sequence
  Description of Artificial Sequence: Synthetic polynucleotide
atgtctgctccacaagccaagattttgtctcaagctccaactgaattggaattacaagttgctcaagctttcgttgaattggaaaattcttctccagaattgaaagctgagttgagacctttgcaattcaagtccatcagagaaatcgacgttgctggtggtaagaaggctttggccatttttgttccagtcccatctttggctggtttccacaaggttcaaactaagttgacccgtgaattggaaaagaaattccaagaccgtcatgtcatcttcttggctgaaagaagaatcttgccaaagccatctagaacatctagacaagtccaaaagagaccaagatccagaaccttgactgctgttcatgacaagatcttggaagacttagtcttcccaactgaaatcgttggtaagagagttagatatttggttggtggtaacaagatccaaaaggttttgttagactccaaggatgtccaacaaatcgactacaaattggaatctttccaagctgtttacaacaaattgactggtaagcaaattgttttcgaaattccaagtgaaactcattga

SEQ ID NO: 10323 - DNA, 528 bp, Saccharomyces cerevisiae
atggatttgaaaagggattggttacgatggaaaattacaataggtagtgggcctggcagtattgtgctggatttcccatcatttttggtagggtgcgtattcacaacaatgatggggccaatattacagaagcttataggtaaacttttggtaggtttaataacggtatgcaaattcttagttattattggaagcattgtcttcgttatcggagttgcatcaaagaaatacacatatgacgatttcaaagtaagtataaaaagatcaggagagccaggggaatcacatgatatgaggactgaaccaaaaagaactgcgaaaacggcaactgttccaatggagaaagacgagggcgtaggttcttataattattttgaaatacctataacgaaagaaacatctacaattccttatattaattgtgatggcacgagctcacttagaaagccacccaacggtccatcaagcgtaggcttatctaactccaacagatacgaaaattttataaacatggcacgacataaataa

SEQ ID NO: 10324 - DNA, 528 bp, Artificial Sequence
  Description of Artificial Sequence: Synthetic polynucleotide
atggatttgaaaagggattggttaagatggaaaattacaataggtagtgggcctggcagtattgtgttggatttcccatcttttttggtagggtgcgtattcacaacaatgatggggccaatattacagaagcttataggtaaacttttggtaggtttaataacggtatgcaaattcttagttattattggaagcattgtcttcgttatcggagttgcatccaagaaatacacatatgacgatttcaaagtaagtataaaaagatctggagagccaggggaaagtcatgatatgaggactgaaccaaaaagaactgcgaaaacggcaactgttccaatggagaaagacgagggcgtaggttcttataattattttgaaatacctataacgaaagaaacatctacaattccttatattaattgtgatggcacgagctctcttagaaagccacccaacggtccatccagcgtaggcttatctaactccaacagatacgaaaattttataaacatggcaagacataaatga

SEQ ID NO: 10325 - DNA, 3231 bp, Saccharomyces cerevisiae
atgtcttcaaacacttcttctgtgatgtcttctccacgtgtcgaaaagagatcgttttcttccactttaaaatcattcttcacaaaccccaataaaaaacggccatcgagcaagaaagttttcagttcaaacctctcatacgcgaatcatttggaggaatcagatgttgaagacacactgcatgttaataagagaaagagggtgtccggtacatcacagcatagcgacagcttaactcagaacaacaataatgcgccaattataatatatggaaccgaaaacactgagagaccgccgcttttgccaattttgcccattcaaagactgaggttattaagggagaagcagagggtgagaaatatgcgtgagcttggattaattcaatcaactgaatttccatctattacatcgtcggttatattgggctctcaaagtaaaagcgatgagggaggatcgtacctatgcacatcatctactccttcccctattaaaaacggttcttgcactaggcagttggccggaaaaagcggtgaagacaccaatgttggactacccattctcaaatcattgaaaaatagatccaatagaaaaaggtttcatagtcagtcaaaggggaccgtgtggtcagcaaattttgaatatgatttgtcagaatatgacgctatacaaaaaaaggataacaaggataaggaaggtaacgctggcggtgatcagaagacaagcgagaatagaaataatattaagagtagtatttcaaatggcaatctggctacaggccctaacctgacaagcgaaattgaagacctacgtgcagacatcaactctaataggttatcgaatcctcaaaaaaatctacttttaaaaggaccagcttccacagttgcaaaaactgcccctattcaggagagctttgttcccaattcagagcgctctggtacgcctacgttaaagaaaaatattgagcccaaaaaggacaaagaaagtattgttttgcccaccgtaggttttgactttatcaaggacaatgagactccatctaagaaaacttctcctaaggcaacttcttctgcaggtgcagtctttaaatcgagtgtagaaatgggaaaaaccgataagtcaacgaaaactgccgaggcgcctaccttatcattcaattttagccaaaaggctaataaaactaaggctgtcgacaatactgtcccttccacaactttattcaattttggtggtaaatcagataccgttacttctgccagtcaaccttttaaatttggaaagacatccgaaaaaagtgaaaatcatacagaatcagacgcgcctccaaaatcaactgctccaatattttcttttggtaaacaagaagagaatggtgatgaaggtgatgatgaaaatgagcccaaaagaaaaaggcgtttacctgttagcgaggatacaaacaccaagcctttattcgatttcggcaagaccggtgatcaaaaggagaccaaaaagggagagtcagaaaaggacgcatcagggaaaccaagctttgtctttggtgcaagtgataagcaagctgaaggtacaccattatttacattcggaaaaaaagctgatgtaacaagcaatattgactcctctgcacaatttacctttggtaaagccgccaccgcgaaagaaacacacaccaaaccatctgagacacctgccacaatagtcaagaagcctacttttacttttgggcagtcaacaagtgaaaataagatctctgagggaagtgcgaaacctacattctctttctctaagtcagaggaggaacgtaagagtagtccaatttcaaacgaagcagctaaaccctcgttttcgtttccgggcaagcctgttgatgttcaagcaccgacggatgataagactctcaagccaactttttcttttactgaacctgctcaaaaagattcatctgttgtttcggaacctaaaaagccctcctttacgtttgcgtcttcaaaaacctcacaaccaaagccattgttttcatttggtaagtcagatgcagctaaagaaccaccaggctctaacacctcattttctttcactaaacctcctgctaatgagacagataaaagacctacaccgccatctttcacctttggcggttccacaacaaataatacaacaaccactagcacaaaaccatcttttagttttggggctcccgagtcgatgaagtcgacagcaagtacagcggcagcaaatacggagaagctatcaaatggcttttcctttacaaagttcaatcacaataaagaaaagtcaaactctccaacttctttcttcgatggttctgcttcctcaacgccgattcctgtcttgggtaagccaacagacgctactggtaatacaacatctaaatctgcattttcattcggtactgctaacaccaatggtaccaatgcctcagcaaactccacatcattctcgtttaacgcccctgctactggtaacggcacaactactacttccaatacctcaggaaccaatatagcgggtacatttaacgtaggaaaaccggatcaaagtatcgctagtggcaatacgaatggagcgggctcggcatttggcttttcgagctcaggaacagcagcaactggtgcagcttctaatcaatcttcatttaattttggaaacaatggtgcagggggtctcaatccttttacatcagcaacttcgtcaactaatgctaatgctggtttattcaataaacctccttccacgaatgcacaaaatgtcaatgttccctctgcttttaattttacgggaaataattcaacgcctggtggcggctctgtatttaatatgaacggcaacactaatgctaatacggtgtttgccggctctaataaccaaccacatcaatcgcaaaccccatctttcaatacaaacagctcattcacgccatcaacagttcctaatattaattttagcggattgaatggcggaattactaataccgcgaccaatgcattaaggccaagtgatatatttggtgcgaatgctgcctctggttccaattcaaacgtaacaaatccatcatccatttttgggggggcaggtggtgtgccgacaacttcttttgggcagccgcagtcagcccctaatcagatggggatgggaacaaataatggcatgagcatgggcggtggtgttatggcgaacagaaagattgcaagaatgaggcactctaaaaggtaa

SEQ ID NO: 10326 - DNA, 3231 bp, Artificial Sequence
  Description of Artificial Sequence: Synthetic polynucleotide
atgtcttccaacacttcttctgtgatgtcttctccacgtgtcgaaaagagatctttttcttccactttaaaatctttcttcacaaaccccaataaaaaaaggccatccagcaagaaagttttcagtagtaacctctcttacgcgaatcatttggaggaaagtgatgttgaagacacattgcatgttaataagagaaagagggtgtccggtacatctcagcatagcgacagcttaactcagaacaacaataatgcgccaattataatatatggaaccgaaaacactgagagaccgccgcttttgccaattttgcccattcaaagattaaggttattaagggagaagcagagggtgagaaatatgcgtgagcttggattaattcaatctactgaatttccatctattacatcttctgttatattgggctctcaaagtaaaagcgatgagggaggatcttacttgtgcacatcttctactccttcccctattaaaaacggttcttgcactaggcagttggccggaaaaagcggtgaagacaccaatgttggattgcccattctcaaatctttgaaaaatagatccaatagaaaaaggtttcatagtcagtccaaggggaccgtgtggtctgcaaattttgaatatgatttgagtgaatatgacgctatacaaaaaaaggataacaaggataaggaaggtaacgctggcggtgatcagaagacaagcgagaatagaaataatattaagagtagtatttctaatggcaatttggctacaggccctaacttaacaagcgaaattgaagacttgcgtgcagacatcaactctaataggttatccaatcctcaaaaaaatttacttttaaaaggaccagcttccacagttgcaaaaactgcccctattcaggagagctttgttcccaattctgagcgctctggtacgcctacgttaaagaaaaatattgagcccaaaaaggacaaagaaagtattgttttgcccaccgtaggttttgactttatcaaggacaatgagactccatctaagaaaacttctcctaaggcaacttcttctgcaggtgcagtctttaaatctagtgtagaaatgggaaaaaccgataagtctacgaaaactgccgaggcgcctaccttatctttcaattttagccaaaaggctaataaaactaaggctgtcgacaatactgtcccttccacaactttattcaattttggtggtaaatctgataccgttacttctgccagtcaaccttttaaatttggaaagacatccgaaaaaagtgaaaatcatacagaaagtgacgcgcctccaaaatctactgctccaatattttcttttggtaaacaagaagagaatggtgatgaaggtgatgatgaaaatgagcccaaaagaaaaaggcgtttacctgttagcgaggatacaaacaccaagcctttattcgatttcggcaagaccggtgatcaaaaggagaccaaaaagggagagagtgaaaaggacgcatctgggaaaccaagctttgtctttggtgcaagtgataagcaagctgaaggtacaccattatttacattcggaaaaaaagctgatgtaacaagcaatattgactcctctgcacaatttacctttggtaaagccgccaccgcgaaagaaacacacaccaaaccatctgagacacctgccacaatagtcaagaagcctacttttacttttgggcagagtacaagtgaaaataagatctctgagggaagtgcgaaacctacattctctttctctaagagtgaggaggaacgtaagagtagtccaatttccaacgaagcagctaaacccagtttttcttttccgggcaagcctgttgatgttcaagcaccgacggatgataagactctcaagccaactttttcttttactgaacctgctcaaaaagattcttctgttgtttctgaacctaaaaagccctcctttacgtttgcgtcttctaaaacctctcaaccaaagccattgttttcttttggtaagagtgatgcagctaaagaaccaccaggctctaacacctctttttctttcactaaacctcctgctaatgagacagataaaagacctacaccgccatctttcacctttggcggttccacaacaaataatacaacaaccactagcacaaaaccatcttttagttttggggctcccgagtccatgaagagtacagcaagtacagcggcagcaaatacggagaagttatccaatggcttttcctttacaaagttcaatcacaataaagaaaagtctaactctccaacttctttcttcgatggttctgcttcctctacgccgattcctgtcttgggtaagccaacagacgctactggtaatacaacatctaaatctgcattttctttcggtactgctaacaccaatggtaccaatgcctctgcaaactccacatctttctcctttaacgcccctgctactggtaacggcacaactactacttccaatacctctggaaccaatatagcgggtacatttaacgtaggaaaaccggatcaaagtatcgctagtggcaatacgaatggagcgggcagtgcatttggcttttctagcagtggaacagcagcaactggtgcagcttctaatcaatcttcttttaattttggaaacaatggtgcagggggtctcaatccttttacaagtgcaacttcttctactaatgctaatgctggtttattcaataaacctccttccacgaatgcacaaaatgtcaatgttccctctgcttttaattttacgggaaataattctacgcctggtggcggctctgtatttaatatgaacggcaacactaatgctaatacggtgtttgccggctctaataaccaaccacatcaatctcaaaccccatctttcaatacaaacagctctttcacgccatctacagttcctaatattaattttagcggattgaatggcggaattactaataccgcgaccaatgcattaaggccaagtgatatatttggtgcgaatgctgcctctggttccaatagcaacgtaacaaatccatcttccatttttgggggggcaggtggtgtgccgacaacttcttttgggcagccgcagtctgcccctaatcagatggggatgggaacaaataatggcatgagcatgggcggtggtgttatggcgaacagaaagattgcaagaatgaggcactctaaaaggtga

SEQ ID NO: 10327 - DNA, 1182 bp, Saccharomyces cerevisiae
atggcgaagattatgatcccagctagcaagcagcctgtttacaaaaaattaggacttcttctggtcgccgtgtttactgtgtatgtgttctttcatggagctcagtatgcgagaggctctgccccaagcccaaagtacagtaccgtgctatcttccggctcgggctataaatactcgaaagtggaactaccaaagtataccggtcctcgggaaaaggccacttttgtcactctagtgcgtaatagagatctatattcgttggctgagtctattaaatccgtggaagatagatttaactccaagttcaactatgattgggtgtttttgaatgatgaagagttcactgatgaattcaaaaacgttacgtcagctttagttagtggtacaacaaaatacggtgtcatcccaaaggaacattggtccttccctgagtggattgatgaagaaaaggccgctcaagtcaggaaggagatgggtgagaagagaatcatctacggtgattctatctcttacagacacatgtgtcgttttgaatcaggcttcttttacagacatcctttgatggatgactacgattggtattggcgtgtggaacctgatatcaagttgcactgtgatatcgactacgatgtcttcaaattcatgaaagacaataagaaaaagtatgcctttgccatttccattaaggagtatgaagctactatccccactttatgggagactactcgtaaattcatggaagcccatcctgagcttatccatgaaaataatatgttagactttgttagcgacgatcagggactttcatacaatttgtgccatttttggtctaattttgaaattgctgctttggatttgtggagatctccagcatactccgcatattttgattatttagatcgtgaaggtggattcttttatgaaagatggggtgatgctccagttcattctattggtgctgcgctgttcttggaccgctctgaaatccatcacttcggtgatattggttattaccatgttccatttcactcctgtccaatagacacaagtatcagactggctaacaaatgtgactgtgatccaagcaaagatttcacatggcacagttattcatgtactactaaattctacaatataaacaagttgccaaagcctgctggttggcaaaaccatatcggttga

SEQ ID NO: 10328 - DNA, 1182 bp, Artificial Sequence
  Description of Artificial Sequence: Synthetic polynucleotide
atggcgaagattatgatcccagctagcaagcagcctgtttacaaaaaattaggacttcttttggtcgccgtgtttactgtgtatgtgttctttcatggagctcagtatgcgagaggctctgccccaagcccaaagtacagtaccgtgttatcttccggcagtggctataaatactctaaagtggaattaccaaagtataccggtcctagagaaaaggccacttttgtcactttggtgcgtaatagagatttatattctttggctgagtctattaaatccgtggaagatagatttaactccaagttcaactatgattgggtgtttttgaatgatgaagagttcactgatgaattcaaaaacgttacgagcgctttagttagtggtacaacaaaatacggtgtcatcccaaaggaacattggtccttccctgagtggattgatgaagaaaaggccgctcaagtcaggaaggagatgggtgagaagagaatcatctacggtgattctatctcttacagacacatgtgtcgttttgaaagtggcttcttttacagacatcctttgatggatgactacgattggtattggcgtgtggaacctgatatcaagttgcactgtgatatcgactacgatgtcttcaaattcatgaaagacaataagaaaaagtatgcctttgccatttccattaaggagtatgaagctactatccccactttatgggagactactcgtaaattcatggaagcccatcctgagcttatccatgaaaataatatgttagactttgttagcgacgatcagggactttcttacaatttgtgccatttttggtctaattttgaaattgctgctttggatttgtggagatctccagcatactccgcatattttgattatttagatcgtgaaggtggattcttttatgaaagatggggtgatgctccagttcattctattggtgctgcgttattcttggaccgctctgaaatccatcacttcggtgatattggttattaccatgttccatttcactcctgtccaatagacacaagtatcagattggctaacaaatgtgactgtgatccaagcaaagatttcacatggcacagttattcttgtactactaaattctacaatataaacaagttgccaaagcctgctggttggcaaaaccatatcggttga

SEQ ID NO: 10329 - DNA, 984 bp, Saccharomyces cerevisiae
atgtcttcagacacttcattatcagaatcttcattattgaaagaagagagtgggagcttgaccaagtctcgtccacctataaaatcaaaccctgtacgcgaaaatatcaaatcatttgtggccggtggagttggcggggtatgtgcggtgtttacgggtcatcccttcgatttgattaaagtgagatgtcaaaatggacaagcgaattccacggtacatgccattacaaatattataaaagaagcaaaaactcaagtaaagggcacattatttaccaattccgtaaaggggttctataaaggtgttatcccgcccttattaggtgttactcccatattcgctgtttctttctggggttacgatgtgggtaagaaactggttacttttaataacaagcaaggaggcagtaacgagttaactatgggacaaatggctgcagcaggatttatcagcgctattcctaccactttagtgactgcgccaacggaaagagtaaaggttgtcctgcaaacatcttctaagggctctttcattcaggcggctaaaaccattgttaaagaaggtggcatagcttctttatttaaaggttcattagccactttagcaagagatgggcctggctcagctctatattttgcatcttatgaaatttcaaaaaattacttgaatagtaggcaacctcgtcaagatgcgggcaaagatgaaccggtcaatatcttgaacgtgtgtcttgctggtggtattgctggtatgtcgatgtggctagctgttttccccatagacactataaagacaaaattgcaggcttcctccacgaggcagaatatgctttccgccacaaaggaaatttatctacaaagaggtggtatcaagggatttttccctggtttaggtcctgctttactaagatctttcccagccaatgcggccacatttttaggtgtggagatgactcattcactgttcaagaagtatggcatatga

SEQ ID NO: 10330 - DNA, 984 bp, Artificial Sequence
  Description of Artificial Sequence: Synthetic polynucleotide
atgtcttctgacacttctttatctgaatcttctttattgaaagaagagagtgggagcttgaccaagtctcgtccacctataaaaagtaaccctgtacgcgaaaatatcaaaagttttgtggccggtggagttggcggggtatgtgcggtgtttacgggtcatcccttcgatttgattaaagtgagatgtcaaaatggacaagcgaattccacggtacatgccattacaaatattataaaagaagcaaaaactcaagtaaagggcacattatttaccaattccgtaaaggggttctataaaggtgttatcccgcccttattaggtgttactcccatattcgctgtttctttctggggttacgatgtgggtaagaaattggttacttttaataacaagcaaggaggcagtaacgagttaactatgggacaaatggctgcagcaggatttatcagcgctattcctaccactttagtgactgcgccaacggaaagagtaaaggttgtcttacaaacatcttctaagggctctttcattcaggcggctaaaaccattgttaaagaaggtggcatagcttctttatttaaaggttctttagccactttagcaagagatgggcctggctctgctttgtattttgcatcttatgaaatttccaaaaattacttgaatagtaggcaacctcgtcaagatgcgggcaaagatgaaccggtcaatatcttgaacgtgtgtcttgctggtggtattgctggtatgtccatgtggttggctgttttccccatagacactataaagacaaaattgcaggcttcctccacgaggcagaatatgctttccgccacaaaggaaatttatttacaaagaggtggtatcaagggatttttccctggtttaggtcctgctttattaagatctttcccagccaatgcggccacatttttaggtgtggagatgactcattctttattcaagaagtatggcatatga

SEQ ID NO: 10331 - DNA, 930 bp, Saccharomyces cerevisiae
atgcagggaaataaatcaactataagagagtataagatagtagttgtcggtggaggtggcgttggtaaatctgctttaacaattcaattcattcaatcatactttgtggacgaatatgaccctactatcgaagattcttacagaaaacaagttgtcatcgatgacaaagtatccattttggacattctagatactgctggacaagaagagtattctgcgatgagagaacagtacatgaggactggggaaggtttcctactggtctattccgtcacctctagaaattcctttgatgagttactgtcttattatcagcaaattcaaagagtaaaagattctgactacattcctgtagtcgtggtaggtaacaaattggaccttgaaaatgaaagacaagtctcttatgaagacgggttacgcctggccaagcagttgaatgcaccctttctagaaacgtctgcgaaacaagccatcaacgtagacgaggccttttatagccttattcgtttggtaagggacgacggtgggaaatacaatagcatgaatcgtcaactggataatacgaatgaaataagagattcggagctaacctcatctgcaacagcggatagagaaaaaaagaacaacgggtcttatgtactcgataattctttgaccaatgctggcactggctccagttcaaagtcagccgttaaccataacggtgaaactactaaacgaactgatgaaaagaattacgttaatcaaaacaataacaatgaaggaaataccaagtactccagtaacggcaacggaaatcgaagtgatattagtcgtggtaatcaaaataatgccttaaattcgagaagtaaacagtctgctgagccacaaaaaaattcaagcgccaacgctagaaaagaatctagtggtggttgttgtataatttgttga

SEQ ID NO: 10332 - DNA, 930 bp, Artificial Sequence
  Description of Artificial Sequence: Synthetic polynucleotide
atgcagggaaataaatctactataagagagtataagatagtagttgtcggtggaggtggcgttggtaaatctgctttaacaattcaattcattcaatcttactttgtggacgaatatgaccctactatcgaagattcttacagaaaacaagttgtcatcgatgacaaagtatccattttggacattttagatactgctggacaagaagagtattctgcgatgagagaacagtacatgaggactggggaaggtttcttattggtctattccgtcacctctagaaattcctttgatgagttattatcttattatcagcaaattcaaagagtaaaagattctgactacattcctgtagtcgtggtaggtaacaaattggaccttgaaaatgaaagacaagtctcttatgaagacgggttacgcttggccaagcagttgaatgcaccctttttggaaacgtctgcgaaacaagccatcaacgtagacgaggccttttatagccttattcgtttggtaagggacgacggtgggaaatacaatagcatgaatcgtcaattggataatacgaatgaaataagagattctgagttgacctcttctgcaacagcggatagagaaaaaaagaacaacgggtcttatgtactcgataattctttgaccaatgctggcactggctccagttccaagtctgccgttaaccataacggtgaaactactaaaagaactgatgaaaagaattacgttaatcaaaacaataacaatgaaggaaataccaagtactccagtaacggcaacggaaatagaagtgatattagtcgtggtaatcaaaataatgccttaaattctagaagtaaacagtctgctgagccacaaaaaaatagtagcgccaacgctagaaaagaatctagtggtggttgttgtataatttgttga

SEQ ID NO: 10333 - DNA, 393 bp, Saccharomyces cerevisiae
atggcaaaagcaccaaaggcaaacacaccaaaagtaaccagcacgtcatctgcagtcttaacagattttcaagaaactttcaagacttctaagagggcatattttgcccaaattgaaaaatatcctaaactgaaactaattgatacattctgcttctttttggtattattaggggtgatccagtgtacattcattatcttgatccgtgataattttccattcaatgcgtttttagcgggattcattatttgtgtgggacaattcgtcctattgatgagtttgcggttacaattgtgtaatagttttccaggcatttctaaaaacagagcttttgccgagtttattgttgctagtttgattttacatttcgtttgtttacattttataaattga

SEQ ID NO: 10334 - DNA, 393 bp, Artificial Sequence
  Description of Artificial Sequence: Synthetic polynucleotide
atggcaaaagcaccaaaggcaaacacaccaaaagtaaccagcacgtcttctgcagtcttaacagattttcaagaaactttcaagacttctaagagggcatattttgcccaaattgaaaaatatcctaaattgaaattgattgatacattctgcttctttttggtattattaggggtgatccagtgtacattcattatcttgatccgtgataattttccattcaatgcgtttttagcgggattcattatttgtgtgggacaattcgtcttattgatgagtttgagattacaattgtgtaatagttttccaggcatttctaaaaacagagcttttgccgagtttattgttgctagtttgattttacatttcgtttgtttacattttataaattga

SEQ ID NO: 10335 - DNA, 849 bp, Saccharomyces cerevisiae
atgaacgtttgcaagttgaaagaaatagtaccactatttccgagatcgtcctttacagatggtgtagtaagtacaggaaaaagtttccgaagctgggacacctgcatggacaataaagcatgtaaaattattgcgattgttggtattgttttggcctgtattcttgtgatttggttgattgggggcttactgacatgtttcaggcaaggggtaacaggaataggtcagttcatttgttggtgttgtcgttgttctaatgacagaaatggaaacaatacaatgccggtaaatgagggttttagtagagttaatatgggcgtggctcctccttctactgtgatttatcagcctattcaacaacctgaaagtgcgtattatagaaacgatgcgaagaatgatacattttacgacgaagtcaaaactcccagtaatgaggtgtatgaattagaggaagatttcgatttggaaaaacaaaaagagaaaacaaggaaaaaacaacagaaggaaagaaataaagaaggacgcagccctagtagggtggcccctctagtgtatgaagaagaaaatttcgaaggtagcagccctcagccgcaatatgatgctagaaattcgtttatccaaaatgcggccaatactggtagcaacaacgctcatgttgcttcacaatctccaatttttgacatcagcgattatggcgagaactattattacgataataataacatcaataataacctccagggaaacagttacaatactccctcctctaatcatagaagtccatatccaaccgaaaattatcaatcatatcagggatataaaccaaaccaaagcgatagatattactaa

SEQ ID NO: 10336 - DNA, 849 bp, Artificial Sequence
  Description of Artificial Sequence: Synthetic polynucleotide
atgaacgtttgcaagttgaaagaaatagtaccattatttccgagaagttcctttacagatggtgtagtaagtacaggaaaaagtttcagaagctgggacacctgcatggacaataaagcatgtaaaattattgcgattgttggtattgttttggcctgtattcttgtgatttggttgattgggggcttattaacatgtttcaggcaaggggtaacaggaataggtcagttcatttgttggtgttgtcgttgttctaatgacagaaatggaaacaatacaatgccggtaaatgagggttttagtagagttaatatgggcgtggctcctccttctactgtgatttatcagcctattcaacaacctgaaagtgcgtattatagaaacgatgcgaagaatgatacattttacgacgaagtcaaaactcccagtaatgaggtgtatgaattagaggaagatttcgatttggaaaaacaaaaagagaaaacaaggaaaaaacaacagaaggaaagaaataaagaaggacgcagccctagtagggtggcccctttagtgtatgaagaagaaaatttcgaaggtagcagccctcagccgcaatatgatgctagaaattcttttatccaaaatgcggccaatactggtagcaacaacgctcatgttgcttctcaatctccaatttttgacatcagcgattatggcgagaactattattacgataataataacatcaataataacctccagggaaacagttacaatactccctcctctaatcatagaagtccatatccaaccgaaaattatcaaagttatcagggatataaaccaaaccaaagcgatagatattactga

SEQ ID NO: 10337 - DNA, 327 bp, Saccharomyces cerevisiae
atgaagaagaaaatttcgaaggtagcagccctcagccgcaatatgatgctagaaattcgtttatccaaaatgcggccaatactggtagcaacaacgctcatgttgcttcacaatctccaatttttgacatcagcgattatggcgagaactattattacgataataataacatcaataataacctccagggaaacagttacaatactccctcctctaatcatagaagtccatatccaaccgaaaattatcaatcatatcagggatataaaccaaaccaaagcgatagatattactaatgaggtaaatatatattcccccttcttttga

SEQ ID NO: 10338 - DNA, 327 bp, Artificial Sequence
  Description of Artificial Sequence: Synthetic polynucleotide
atgaagaagaaaatttccaaggtagcagccctcagccgcaatatgatgttggaaattcgtttatccaaaatgagaccaatattagtagcaacaacgctcatgttgcttcacaatctccaatttttgacatctgcgattatggcgagaactattattacgataataataacatctataataacctccagggaaacagttacaatactccctcctttgatcatagaagtccatatccaaccgaaaattatcaatcatatcagggatataaaccaaaccaaagcgatagatattactaatgaggtaaatatatattcccccttcttttga

SEQ ID NO: 10339 - DNA, 852 bp, Saccharomyces cerevisiae
atgtcctttttcgacatcgaagcacaatcttcaaagggtaactcccagcaagaaccacaattctcaacaaatcaaaaaacgaaggaattaagcaatttaattgagacattcgctgaacaatcccgcgtgctggaaaaggaatgcaccaaaattggttccaaacgggactccaaagaactaagatacaaaattgaaacagagttaataccgaactgcaccagtgtaagggataaaattgagagcaacatcctcattcaccaaaatggaaagttgtctgctgatttcaagaacctgaaaacgaagtatcaatccctacaacaatcatacaatcaaaggaagagtctgttccctctaaaaacgcctatttcaccaggaacatctaaggaaagaaaagacatccatccgcgaactgaagccgtgcgacaagatccagagtctagttatatttctataaaagtaaacgagcagagtcctttactgcataacgaaggacaacaccaattacagctgcaagaagaacaagaacaacaacagcaaggattgtcccaagaagaactagattttcaaacaatcattcaccaggaaagatcccaacagataggacgcattcatacggcggtacaagaagtcaatgctattttccatcagctcggttcattagtgaaagaacagggagaacaagtaaccaccatagacgagaatatctcgcatttacatgataacatgcagaatgcaaacaaacaattaaccagagcagaccagcatcagagggaccgtaacaaatgcggtaaggtcaccctaatcattataatagttgtgtgcatggtggtattgcttgctgtattaagttag

SEQ ID NO: 10340 - DNA, 852 bp, Artificial Sequence
  Description of Artificial Sequence: Synthetic polynucleotide
atgtcctttttcgacatcgaagcacaatcttccaagggtaactcccagcaagaaccacaattcagtacaaatcaaaaaacgaaggaattaagcaatttaattgagacattcgctgaacaatcccgcgtgttggaaaaggaatgcaccaaaattggttccaaaagagactccaaagaattgagatacaaaattgaaacagagttaataccgaactgcaccagtgtaagggataaaattgagagcaacatcctcattcaccaaaatggaaagttgtctgctgatttcaagaacttgaaaacgaagtatcaatccttacaacaatcttacaatcaaaggaagagtttattccctttgaaaacgcctatttctccaggaacatctaaggaaagaaaagacatccatccgagaactgaagccgtgagacaagatccagagtctagttatatttctataaaagtaaacgagcagagtcctttattacataacgaaggacaacaccaattacagttacaagaagaacaagaacaacaacagcaaggattgtcccaagaagaattagattttcaaacaatcattcaccaggaaagatcccaacagataggacgcattcatacggcggtacaagaagtcaatgctattttccatcagctcggttctttagtgaaagaacagggagaacaagtaaccaccatagacgagaatatctctcatttacatgataacatgcagaatgcaaacaaacaattaaccagagcagaccagcatcagagggaccgtaacaaatgcggtaaggtcaccttaatcattataatagttgtgtgcatggtggtattgcttgctgtattaagttga

SEQ ID NO: 10341 - DNA, 930 bp, Saccharomyces cerevisiae
atggcgagtgtaccaagtctatgcgacatactgataccgctagaaaagaatagtcgcagcgacggcgatgctgaaagtagcaatacagtgctgattcaactgcgaaaagggcatcacgaacggatgcgttctccttacacaatacaaaagttttacaaatttctaaaaagagctcattgtgaggaaaatttagaatttttcgaaaaagctcatcagttcctccagcttaagcaaaacaggagtattagcgaggagaagctcttggaagtttggaacaagtcgttgtacataaaatacattgccgtggactcccccaaagaatgcaacttttcacaggatactagggagatatttgagaagtgctttgctaacaatgaagtacctgccgacgtagacgtcctgtgtgccattagccatgtgatgggcctattaatggacgggtatcaccgatttgtgagttctgttaatgagaaaaagtactccgccacatatgcccacaatgactctgctacggaacaagatctcaaaaacgagtctacaacttctttttcgtcattaggcgtggaggatatttctgaagatagaaattcgtatcttaagaagcctgatatcaatggtttgtcaactatcattcaagaaacgtctgcaaacacgaccaatgagtcgcaatgcagcgatcgcacttctcggccaagcgagtcctcttcctcactcaacactaccagctcgacctacaagaataccagcactagaaatctgcaaaaaccgcaaaatacaggaattctcaactcggggaaaggtttattgcaaaaacttaactttgttaaaaaacggaaatctttcaaacagccttcaggcgtcatttgtagccattataacagcaatgttcaaaaccgtttgaaaggacaaaacagtcatcaacaaagatag

SEQ ID NO: 10342 - DNA, 930 bp, Artificial Sequence
  Description of Artificial Sequence: Synthetic polynucleotide
atggcgagtgtaccaagtttatgcgacatattaataccgttggaaaagaatagtcgcagcgacggcgatgctgaaagtagcaatacagtgttgattcaattaagaaaagggcatcacgaaagaatgcgttctccttacacaatacaaaagttttacaaatttttgaaaagagctcattgtgaggaaaatttagaatttttcgaaaaagctcatcagttcctccagcttaagcaaaacaggagtattagcgaggagaagctcttggaagtttggaacaagtctttgtacataaaatacattgccgtggactcccccaaagaatgcaacttttcccaggatactagggagatatttgagaagtgctttgctaacaatgaagtacctgccgacgtagacgtcttatgtgccattagccatgtgatgggcttattaatggacgggtatcacagatttgtgagttctgttaatgagaaaaagtactccgccacatatgcccacaatgactctgctacggaacaagatctcaaaaacgagtctacaacttctttttcttctttaggcgtggaggatatttctgaagatagaaattcttatcttaagaagcctgatatcaatggtttgtctactatcattcaagaaacgtctgcaaacacgaccaatgagtctcaatgcagcgatcgcacttctagaccaagcgagtcctcttcctctctcaacactaccagctctacctacaagaataccagcactagaaatttacaaaaaccgcaaaatacaggaattctcaactctgggaaaggtttattgcaaaaacttaactttgttaaaaaaagaaaatctttcaaacagccttccggcgtcatttgtagccattataacagcaatgttcaaaaccgtttgaaaggacaaaacagtcatcaacaaagatga

SEQ ID NO: 10343 - DNA, 1815 bp, Saccharomyces cerevisiae
atggtaaaacattcgttcatagcgctagctgagcatgctagtaaactaagaaggtctatcccacccgtcaaactgacttataaaaatatgctacgggacccatcggtaaaatatagggcgtttgctccaccaaaaatggtcaagaggatttggcctgacaaaactattcaaaaggctccacgttggctgtctactgacttgagggacggtaatcaatctttaccggacccaatgtctgtggctcaaaagaaagaatatttccacaagttgatcaacatcggtttcaaagaaatcgaagtgtctttcccctctgcatctcaaacagatttcgacttcaccaggtatgctgtagaaaacgctccagatgatgttggtattcaatgtcttgtccaatctagagaacacttgattaaaagaaccgtggaagcattgactggtgctaaaagggctaccatacatacttacttggccacaagtgacatgttccgagaaattgtcttcaatatgtctagagaggaagctatttctaaagctgtagaagccaccaaactggttaggaaactaaccaaggatgacccttcccagcaagctactcgttggtcctatgagttttctcccgaatgtttcagtgatacgccaggtgaatttgctgtagaaatttgtgaagctgttaaaaaggcttgggaacctaccgaggaaaatccgatcattttcaacttaccagctactgtagaagttgcctctccaaatgtttacgctgatcaaattgagtacttctctacccacattactgagcgtgagaaggtctgtatttctacgcattgtcacaatgaccgtggttgcggtgtcgccgccacagaattaggtatgcttgcaggcgctgatcgtgtagaaggttgtctatttggtaatggtgaacgtacaggtaatgttgatttggttacagttgccatgaatatgtatacccaaggtgtttctcctaatttagatttctcagatttaacttcaatttctgaaattgtccatcgctgtaacaagattccaattcccccaagagccccatatggcggtgaattggttgtttctgccttttctggttctcatcaggatgcaattaagaagggatttgcaatccaaaacaagaaacaggctcaaggagaaactcggtggagaattccatacttaccattggatccaaaggatattggacgtgattacgaagccgtcatcagagtcaactctcaatccggtaagggtggtgctgcttgggttattatgagatctctaggattagatgtaccaagaccaatgcaagttgatttctccaatactctacagaaaaatgcagatgccttaggaagagagttaaaatccgaagagattacaaaattgttcaaagaaacttacaactacaacaacaatgaacatatatacgtcaccttgttgaattacgaagttaagaaattgaacccagagcgtagagctttagtgggccaggtagaaatcaacgataaggttgtcaacatcgaaggctacggaaatggtcctatctcttctttggtggatgcgctatccaatttactgaatgttaagttgagcgttcaaaactactctgaacattccttgggttctggttctgcaacccaagcggcatctttcataaatctttcctacataaaggacatcaataatcatgctactagtaatatgtggggtgttggtgtctccgaagacactggggatgcatctattaaggcggtatttgctactgtcaataatattattcattccggggatgttctactggcagagtaa

SEQ ID NO: 10344 - DNA, 1815 bp, Artificial Sequence
  Description of Artificial Sequence: Synthetic polynucleotide
atggtaaaacattctttcatagcgttagctgagcatgctagtaaattgagaaggtctatcccacccgtcaaattaacttataaaaatatgttgagagacccatctgtaaaatatagggcgtttgctccaccaaaaatggtcaagaggatttggcctgacaaaactattcaaaaggctccacgttggttatctactgacttgagggacggtaatcaatctttaccggacccaatgtctgtggctcaaaagaaagaatatttccacaagttgatcaacatcggtttcaaagaaatcgaagtgtctttcccctctgcatctcaaacagatttcgacttcaccaggtatgctgtagaaaacgctccagatgatgttggtattcaatgtcttgtccaatctagagaacacttgattaaaagaaccgtggaagcattgactggtgctaaaagggctaccatacatacttacttggccacaagtgacatgttcagagaaattgtcttcaatatgtctagagaggaagctatttctaaagctgtagaagccaccaaattggttaggaaattgaccaaggatgacccttcccagcaagctactcgttggtcctatgagttttctcccgaatgtttcagtgatacgccaggtgaatttgctgtagaaatttgtgaagctgttaaaaaggcttgggaacctaccgaggaaaatccgatcattttcaacttaccagctactgtagaagttgcctctccaaatgtttacgctgatcaaattgagtacttctctacccacattactgagcgtgagaaggtctgtatttctacgcattgtcacaatgaccgtggttgcggtgtcgccgccacagaattaggtatgcttgcaggcgctgatcgtgtagaaggttgtttatttggtaatggtgaacgtacaggtaatgttgatttggttacagttgccatgaatatgtatacccaaggtgtttctcctaatttagatttcagtgatttaacttctatttctgaaattgtccatcgctgtaacaagattccaattcccccaagagccccatatggcggtgaattggttgtttctgccttttctggttctcatcaggatgcaattaagaagggatttgcaatccaaaacaagaaacaggctcaaggagaaactagatggagaattccatacttaccattggatccaaaggatattggacgtgattacgaagccgtcatcagagtcaactctcaatccggtaagggtggtgctgcttgggttattatgagatctttgggattagatgtaccaagaccaatgcaagttgatttctccaatactttacagaaaaatgcagatgccttaggaagagagttaaaatccgaagagattacaaaattgttcaaagaaacttacaactacaacaacaatgaacatatatacgtcaccttgttgaattacgaagttaagaaattgaacccagagcgtagagctttagtgggccaggtagaaatcaacgataaggttgtcaacatcgaaggctacggaaatggtcctatctcttctttggtggatgcgctttccaatttattgaatgttaagttgagcgttcaaaactactctgaacattccttgggttctggttctgcaacccaagcggcatctttcataaatctttcctacataaaggacatcaataatcatgctactagtaatatgtggggtgttggtgtctccgaagacactggggatgcatctattaaggcggtatttgctactgtcaataatattattcattccggggatgttttattggcagagtga

SEQ ID NO: 10345 - DNA, 3324 bp, Saccharomyces cerevisiae
atgattatctttgtttcagaagaacctgaaaggaggctagccattgtatccaacttgtatgctcttgttcttaaaccggttgggaaaaagccatctgataaacccctttgtgccattgaacttcttcaaaaaaatgatttgaaaaaatatggcttcaaaagacttacatcacacgaaatttttggtgttatcggactcattgaggttaatggcctgctgtttgttggtgccatcactgggaaatcaaaagttgcacagccatgcccaggagagactgtgaacaaaatttttgctgtcgattttttttgtttaaatgacaacagttgggattttattgaaatcgactcctcaggttatcctgtgttgccggagactgcttcaactgaatatcaagacgccttgccaaaacatccatgctatgaattgaagaaactattatccaatggatctttttattatagttcagattttgatttgacctcaaccttacagcatcgtggatatggtcagcattctttgagtacagatacctacgaagaagaatatatgtggaactcttttctcatgcaagaaatgatcacatacagagatcatttggacacaaatttgaaacaaatcttggatgacgaggggtttttaacaacagttatccgtggatttgcggaaactttcgtctcgtacgttaagaagttgaaagttgctcttactatcatctcgaaacagagctggaaaagagcaggaacaagatttaatgcacgtggtgtggatgatgaggcaaacgttgccaatttcgtagaaacggaattcattatgtattctagccaatactgttatgcttttacacagattagaggcagtatacctgtattctgggagcaaggtacctctttaatcaatccaagagtacaaattacaagatcatttgaagccacccaaccggtatttgacaaacatatcatgaaatcagtggaaaagtacggacctgtgcatgtcgttaatttgttatcaacgaaatcttctgaaattgaactttcaaaacgatacaaggagcatttaactcattcaaaaaaattgaacttcaacaaagatatatttttgacagaattcgattttcataaagaaacttcgcaagaaggcttttccggtgtcagaaaactcattccattaatattggactctcttttatcttctggctattattcttacgatgttagagaaaaaaagaacatatctgaacaacatggcatatttaggaccaactgtttagattgtttggatagaacaaatttagctcagcaaattatttctttggctgcttttagaacttttctcgaagatttccgattgattagttcaaattcgttcatcgacgatgatgatttcgtttctaaacataacaccctgtgggctgatcacggtgatcaaatttcccaaatatatactggtactaatgctttgaagtcctcattttcaagaaaaggtaaaatgtcacttgctggggcattatcagacgccacaaaatcggtcagcagaatatatattaacaatttcatggataaagaaaagcaacaaaatatcgatactttgttgggaaggttaccgtatcagaaagcagtgcaactttatgatcccgtaaacgaatacgtaagtacgaaattacaaagcatgtctgataagttcacatcaacctccaacattaacttgttaataggatcattcaatgttaatggcgcaaccaaaaaagttgatttatcaaagtggttatttccaatcggtgaaaaatttaaacccgatattgttgttttaggtcttcaagaagttatagaactatctgcgggttcgattttgaacgctgattactcgaaaagctctttctgggaaaacttagtgggtgattgcttaaaccagtatgatgataaatatctgttgttaagagtagagcaaatgacttctttactaattttattttttgttaaagcagacaaagctaaatacgtcaaacaagtggagggtgctactaaaaaaactggctttaggggtatggctgggaataaaggtgcagtgtctataagatttgagtacggtgccacttcattttgttttgtcaattctcatctcgcagcaggagctacgaatgtcgaagaacgtcgaagtgattacgagagcatagttagaggtattactttcactagaactaagatgattcctcatcacgattcgattttctggttaggtgacatgaattatagaataaatctaccgaacgaagacgtcagaagagagttgctcaaccaagaagaaggatatatcgataaactgttgcattttgatcaacttaccctaggtattaattctggcagtgtatttgaaggcttcaaagaaccaactctcaagttccgtccaacatacaagtatgatcccgggacaggaacttatgattcttctgaaaaggaaaggacgccgtcatggacagatagaattatttataaaggggaaaacttacttcctttatcttattcagatgctccgataatgattagcgaccatcggccagtttacgcagcatatagagcaaaaataacttttgttgatgataaagagagactatctctcaagaaacgtttattcacagaatacaaacaagagcatcccgaagaaccgggttctctgatatcggatcttctcagccttgatctggataataagagcactgatggattcaaaagctcttctgaaagttctctacttgatattgatccgataatggcacaaccgacagcgtccagcgttgcttcttcgtcacctgtgtcttcagcatcggcttcactacaacctgtcagaactcaaaacagtagccagtcgcgtacccccataaagaaaccggtattgcgccccccacccccacctgctcataaatctgtatcagcacctgctccttcaacatcgaaggaaaaatcaccaacaccacagacctcaactgcatcgttgtcatctgtgactaaaaatatacaggaaaataaaccattggcgcaaaatagacgaattccaccaccaggttttagtcaaaatatattaactccaaaaagtaccagtaacttggcttcgcctatgtcttctaaggttgatttatataatagcgcgagtgaatctacacgttcagcccaagatgcaagacaacagacacctacagcatttgcagcatcaagagacgtcaatgggcagcccgaagctttgctaggtgatgaaaatccaattgagccagaggaaaaggccaaactaaaccatatgactttagactcatggcagccattgaccccaaaatga

SEQ ID NO: 10346 - DNA, 3324 bp, Artificial Sequence
  Description of Artificial Sequence: Synthetic polynucleotide
atgattatctttgtttctgaagaacctgaaaggaggttggccattgtatccaacttgtatgctcttgttcttaaaccggttgggaaaaagccatctgataaacccctttgtgccattgaacttcttcaaaaaaatgatttgaaaaaatatggcttcaaaagacttacaagtcacgaaatttttggtgttatcggactcattgaggttaatggcttactttttgttggtgccatcactgggaaatctaaagttgcacagccatgcccaggagagactgtgaacaaaatttttgctgtcgattttttttgtttaaatgacaacagttgggattttattgaaatcgactccagtggttatcctgtgttgccggagactgcttccactgaatatcaagacgccttgccaaaacatccatgctatgaattgaagaaattattatccaatggatctttttattatagttctgattttgatttgacctccaccttacagcatcgtggatatggtcagcattctttgagtacagatacctacgaagaagaatatatgtggaactcttttctcatgcaagaaatgatcacatacagagatcatttggacacaaatttgaaacaaatcttggatgacgaggggtttttaacaacagttatccgtggatttgcggaaactttcgtctcttacgttaagaagttgaaagttgctcttactatcatctccaaacagagctggaaaagagcaggaacaagatttaatgcacgtggtgtggatgatgaggcaaacgttgccaatttcgtagaaacggaattcattatgtattctagccaatactgttatgcttttacacagattagaggcagtatacctgtattctgggagcaaggtacctctttaatcaatccaagagtacaaattacaagatcttttgaagccacccaaccggtatttgacaaacatatcatgaaatctgtggaaaagtacggacctgtgcatgtcgttaatttgttatctacgaaatcttctgaaattgaactttctaaaagatacaaggagcatttaactcattctaaaaaattgaacttcaacaaagatatatttttgacagaattcgattttcataaagaaacttctcaagaaggcttttccggtgtcagaaaactcattccattaatattggactctcttttatcttctggctattattcttacgatgttagagaaaaaaagaacatatctgaacaacatggcatatttaggaccaactgtttagattgtttggatagaacaaatttagctcagcaaattatttctttggctgcttttagaacttttctcgaagatttcagattgattagtagtaattctttcatcgacgatgatgatttcgtttctaaacataacaccttatgggctgatcacggtgatcaaatttcccaaatatatactggtactaatgctttgaagtcctctttttccagaaaaggtaaaatgtctcttgctggggcattaagtgacgccacaaaatctgtcagcagaatatatattaacaatttcatggataaagaaaagcaacaaaatatcgatactttgttgggaaggttaccgtatcagaaagcagtgcaactttatgatcccgtaaacgaatacgtaagtacgaaattacaaagcatgtctgataagttcacatctacctccaacattaacttgttaataggaagtttcaatgttaatggcgcaaccaaaaaagttgatttatccaagtggttatttccaatcggtgaaaaatttaaacccgatattgttgttttaggtcttcaagaagttatagaattatctgcgggttccattttgaacgctgattactctaaaagctctttctgggaaaacttagtgggtgattgcttaaaccagtatgatgataaatatcttttgttaagagtagagcaaatgacttctttattgattttattttttgttaaagcagacaaagctaaatacgtcaaacaagtggagggtgctactaaaaaaactggctttaggggtatggctgggaataaaggtgcagtgtctataagatttgagtacggtgccacttctttttgttttgtcaattctcatctcgcagcaggagctacgaatgtcgaagaacgtcgcagtgattacgagagcatagttagaggtattactttcactagaactaagatgattcctcatcacgattctattttctggttaggtgacatgaattatagaataaatttaccgaacgaagacgtcagaagagagttgctcaaccaagaagaaggatatatcgataaacttttgcattttgatcaacttaccttgggtattaattctggcagtgtatttgaaggcttcaaagaaccaactctcaagttccgtccaacatacaagtatgatcccgggacaggaacttatgattcttctgaaaaggaaaggacgccgagctggacagatagaattatttataaaggggaaaacttacttcctttatcttattctgatgctccgataatgattagcgaccatagaccagtttacgcagcatatagagcaaaaataacttttgttgatgataaagagagattatctctcaagaaacgtttattcacagaatacaaacaagagcatcccgaagaaccgggttctttgatatctgatcttctcagccttgatttggataataagagcactgatggattcaaaagctcttctgaaagttctttacttgatattgatccgataatggcacaaccgacagcgtccagcgttgcttcttcttctcctgtgtcttctgcatctgcttctttacaacctgtcagaactcaaaacagtagccagtctcgtacccccataaagaaaccggtattgcgccccccacccccacctgctcataaatctgtatctgcacctgctccttctacatccaaggaaaaatctccaacaccacagacctctactgcaagtttgtcttctgtgactaaaaatatacaggaaaataaaccattggcgcaaaatagaagaattccaccaccaggttttagtcaaaatatattaactccaaaaagtaccagtaacttggcttcccctatgtcttctaaggttgatttatataatagcgcgagtgaatctacacgttctgcccaagatgcaagacaacagacacctacagcatttgcagcatctagagacgtcaatgggcagcccgaagctttgttgggtgatgaaaatccaattgagccagaggaaaaggccaaattgaaccatatgactttagactcttggcagccattgaccccaaaatga

SEQ ID NO: 10347 - DNA, 1308 bp, Saccharomyces cerevisiae
atggtggtgaacacgatatatatcgcaaggcatggatacagatccaactggcttccggagggtccatatcctgacccacttacaggaattgatagcgatgttcctttagcagaacacggagtccagcaagccaaagagttggcccattaccttttgtccttggataatcaaccagaggccgccttcgcttctccattttatagatgtcttgagactgtacaaccgatagctaagctgttagaaatacctgtttatctagaaaggggtatcggggaatggtatagacctgatagaaaacctgttattccagtacctgctggatatgagatactaagcaaattttttccaggtgtcattagccaagaatgggactctacattaacaccaaatgaaaagggtgagacagaacaggagatgtatatgagattcaaaaaattttggcccttatttattgaacgtgtagaaaaggaatatccaaatgttgagtgcatactgttggtcacacacgctgcatctaagattgcccttggaatgagcttgctgggatacgataatcctcggatgtctttgaatgaaaatggtgataaaataagaagtggtagttgctcattagacaaatacgaaattcttaaaaaaagctacgatactatagatgaaactgatgatcaaacatcctttacctatataccatttagtgacagaaaatgggttttaacgatgaatgggaataccgagtttttgagtagtggtgaagaaatgaattggaattttgattgtgtggcagaagctggttcagatgctgatatcaaaaagagacaaatgacaaaaaaaaccagctcaccaataccagaagcagatgatcaaacggaagtagaaaccgtttatatcagtgttgatattcccagcggcaattacaaagagaggaccgagatagcaaagagcgcaattttacaatattccggtttagaaacagatgctccgttgtttagaatcggaaatagattgtatgagggaagctgggagagacttgttggcacggagcttgctttcccaaatgctgcacatgtacataaaaagacagccggtctactatcaccgactgaagagaatgaaacaacaaatgctggtcaaagtaaaggctcatcgactgccaacgacccaaacatacaaatacaagaagaagacgttggactaccggattcaactaacacaagtagagatcacacgggagataaagaagaggttcaatcagaaaagatttatagaataaaagagaggatagtgctaagcaatgtccgccctatgtaa

SEQ ID NO: 10348 - DNA, 1308 bp, Artificial Sequence
  Description of Artificial Sequence: Synthetic polynucleotide
atggtggtgaacacgatatatatcgcaaggcatggatacagatccaactggcttccggagggtccatatcctgacccacttacaggaattgatagcgatgttcctttagcagaacacggagtccagcaagccaaagagttggcccattaccttttgtccttggataatcaaccagaggccgccttcgcttctccattttatagatgtcttgagactgtacaaccgatagctaagcttttagaaatacctgtttatttggaaaggggtatcggggaatggtatagacctgatagaaaacctgttattccagtacctgctggatatgagatattaagcaaattttttccaggtgtcattagccaagaatgggactctacattaacaccaaatgaaaagggtgagacagaacaggagatgtatatgagattcaaaaaattttggcccttatttattgaacgtgtagaaaaggaatatccaaatgttgagtgcatattattggtcacacacgctgcatctaagattgcccttggaatgagcttgttgggatacgataatcctagaatgtctttgaatgaaaatggtgataaaataagaagtggtagttgctctttagacaaatacgaaattcttaaaaaaagctacgatactatagatgaaactgatgatcaaacatcctttacctatataccatttagtgacagaaaatgggttttaacgatgaatgggaataccgagtttttgagtagtggtgaagaaatgaattggaattttgattgtgtggcagaagctggttctgatgctgatatcaaaaagagacaaatgacaaaaaaaaccagctctccaataccagaagcagatgatcaaacggaagtagaaaccgtttatatcagtgttgatattcccagcggcaattacaaagagaggaccgagatagcaaagagcgcaattttacaatattccggtttagaaacagatgctccgttgtttagaatcggaaatagattgtatgagggaagctgggagagacttgttggcacggagcttgctttcccaaatgctgcacatgtacataaaaagacagccggtttattatctccgactgaagagaatgaaacaacaaatgctggtcaaagtaaaggctccagcactgccaacgacccaaacatacaaatacaagaagaagacgttggattaccggattctactaacacaagtagagatcacacgggagataaagaagaggttcaaagtgaaaagatttatagaataaaagagaggatagtgttgagcaatgtccgccctatgtga

SEQ ID NO: 10349 - DNA, 699 bp, Saccharomyces cerevisiae
atgtctggaaatagtcaactgccacccgacgtaatcgggtttatatgttctaagtatgatatcattttggccagcacctctccacggaggtatgaaattttacacgatataatgggaatcaccgatttaaaaacaatggtttctacttttgaagagaatcttgataaaatgaattattctaccgatccgattggatatgtgtgcgatactagctggcataaagcgcagaatataatcgagattttgacagattacgaagatgaaaacccaaatgaaattgataaacctaagcttatcatatgtgcagacacaattattatagataagagtgggagaatctacgagaagcctaaaacaaaagaggtccaaaagaagtttttaatgaagttttgctatgaagatgatgaaccagttaacgttgtcaccgctgtgactttaattaaatggtacggcagagaaaactttgaattggtaccattccgagatgaaaccaaggtatactttgataacaaaatacctttgagaatattggaagaatatgtagaaagcggagatgggctggaggttggcggtggatttaaaatacaagggcaaggtgctattctaattgaaaaaattgaaggtgattactataacgtagttggtttaccgctcaataaaacgttcaaaggactctatgctgaggctaattccatataa

SEQ ID NO: 10350 - DNA, 699 bp, Artificial Sequence
  Description of Artificial Sequence: Synthetic polynucleotide
atgtctggaaatagtcaattaccacccgacgtaatcgggtttatatgttctaagtatgatatcattttggccagcacctctccaagaaggtatgaaattttacacgatataatgggaatcaccgatttaaaaacaatggtttctacttttgaagagaatcttgataaaatgaattattctaccgatccgattggatatgtgtgcgatactagctggcataaagcgcagaatataatcgagattttgacagattacgaagatgaaaacccaaatgaaattgataaacctaagcttatcatatgtgcagacacaattattatagataagagtgggagaatctacgagaagcctaaaacaaaagaggtccaaaagaagtttttaatgaagttttgctatgaagatgatgaaccagttaacgttgtcaccgctgtgactttaattaaatggtacggcagagaaaactttgaattggtaccattcagagatgaaaccaaggtatactttgataacaaaatacctttgagaatattggaagaatatgtagaaagcggagatgggttagaggttggcggtggatttaaaatacaagggcaaggtgctattttaattgaaaaaattgaaggtgattactataacgtagttggtttaccgctcaataaaacgttcaaaggactctatgctgaggctaattccatatga

SEQ ID NO: 10351 - DNA, 2286 bp, Saccharomyces cerevisiae
atgaatttttccagcattttcaaatctatttcgaatttccagttcccatacaccatagaggaaactgcaatcactgaaaccgccctttggcaatgtttcgatggtacaaggaaggcagattccttgccagtaacagtttttaaggcaaaaagatctccagaaaatgaatctttaattttaaatgctgtacacaagagcaaaattttgaagattccaggactttgtacggtgctggagacatttgattccgacccccaatccacatttattgttaccgaacgagtagttccatttccttgggataatctaggctctttatctcaaaacaaatttggtgttgaattaggaatatcacaattattggcaactttaggatttttaaaaaactttgtccttggtacgctttctaaagattctgtttttatcaatattaagggagagtgggtactatttgggctagaactttgttcaagcaaagaaggattaagtgcgtttgaatttgccagtagagcgaggtcatattacaacataattggctcacagttgccctgtgaagatccgaatacaattgattcaatggggttaggattgttgataaagagccttatggctccttcttgtctgcccaaagattggattgtcaatgtaaatatgatttcagatggaaagataacaatcgaaaacttcagaaaaaggctagaaaatacagaaacttggcgttctaatcctttgataaacttttatcaagaattgagggagttgcatataaaggacccacagggaaaattggttgtgatgtcaaacttggaaaatttgtatttagagtcaagagagattttccgtaatttaacgcctggaatgatagaaaattttattattccagagctttgtgaaattataaaattattaatgacacaaagcatcagtagtgctgccagccctataggcatgaacttcaacgcatcacataaactagtaccattcttagcgattgttttagacctaacttctgaaacgaacacctttccagttggtttcaacgaccttatcacccaaagttttaaactgccagataggcaagtaagatttcttttactaatatacctacccaaattaataggtccattgagcaaatcagagatctccagtaggatatatccacattttatccaaggtctgaccgactctgatgccactcttagattacaaacactgaagacaattccatgcattgtgtcatgtttaacagagagacaactgaataatgagctactgaggtttctcgcaaaaacacaggttgattctgacgttgaaatccgaacatggacagtcatcataataagtaaaatctcaaccatattatcaacgtcagttggtaatcgctcgaatattttagctacggcgttcacaaaatctttgaaagatcctcaagtaaaaccaagattggctgctctttatgggcttgagaagtcgattgagctgtttgatgtgaacacaatcgccaacaaaattttaacagtcattgcccctggtttattagataaaagtcccatagtaagaggcagagccaaaatcctgttcgaagaatatctggaaaaattggaaaaagaagcccaacttattcaaacaaacgatagtactgcagattcggaagatgtgaaagatattgattttgagaattacggttgtgatgaagaggatatgaataaagaagacaatttgttagccgcacaatttttaaataatttacgtttaaattctccctcagcaacaacaccaagtaacattaccgagagcgaaattgattccgcccaggatggaagtggatgggacgacctcagcgataccgatggctttattacaaatggtaccacagaatccttcgatgaaacaacaaaccctgtaacaaccgcaagcaccccaaaattattcggaaaacctattaaaattaataaaagttggaatgatgagttgaatgatgatggctggattcaagatgaaagcggcccatcaaaggtgcctcaaaaacacacaaggccacaaaattcaacgttggcaaaatccatcgctcctagctcaaggctttctatcaagaagaagaaaacaacgatcctagcaccaagaaacattgctagtaactctactgttaccaccaaatcgtcactgtccaataaaactgcaagaagtaagcctataagtagtatccgcggctcggtaaccaagaaaggaaatgttgacggctgggatgatgatggggattcagactcctgggatacgaattggtga

SEQ ID NO: 10352 - DNA, 2286 bp, Artificial Sequence
  Description of Artificial Sequence: Synthetic polynucleotide
atgaatttttccagcattttcaaatctatttctaatttccagttcccatacaccatagaggaaactgcaatcactgaaaccgccctttggcaatgtttcgatggtacaaggaaggcagattccttgccagtaacagtttttaaggcaaaaagatctccagaaaatgaatctttaattttaaatgctgtacacaagagcaaaattttgaagattccaggactttgtacggtgttggagacatttgattccgacccccaatccacatttattgttaccgaaagagtagttccatttccttgggataatttgggctctttatctcaaaacaaatttggtgttgaattaggaatatctcaattattggcaactttaggatttttaaaaaactttgtccttggtacgctttctaaagattctgtttttatcaatattaagggagagtgggtattatttgggttggaactttgtagcagcaaagaaggattaagtgcgtttgaatttgccagtagagcgaggagttattacaacataattggctctcagttgccctgtgaagatccgaatacaattgattctatggggttaggattgttgataaagagccttatggctccttcttgtttgcccaaagattggattgtcaatgtaaatatgatttctgatggaaagataacaatcgaaaacttcagaaaaaggttagaaaatacagaaacttggcgttctaatcctttgataaacttttatcaagaattgagggagttgcatataaaggacccacagggaaaattggttgtgatgtccaacttggaaaatttgtatttagagagcagagagattttccgtaatttaacgcctggaatgatagaaaattttattattccagagctttgtgaaattataaaattattaatgacacaaagcatcagtagtgctgccagccctataggcatgaacttcaacgcatctcataaattagtaccattcttagcgattgttttagacttgacttctgaaacgaacacctttccagttggtttcaacgaccttatcacccaaagttttaaattaccagataggcaagtaagatttcttttattgatatacttgcccaaattaataggtccattgagcaaaagtgagatctccagtaggatatatccacattttatccaaggtttgaccgactctgatgccactcttagattacaaacattgaagacaattccatgcattgtgagctgtttaacagagagacaattgaataatgagttattgaggtttctcgcaaaaacacaggttgattctgacgttgaaatcagaacatggacagtcatcataataagtaaaatctccaccatattatctacgtctgttggtaatcgcagtaatattttagctacggcgttcacaaaatctttgaaagatcctcaagtaaaaccaagattggctgctctttatgggcttgagaagtctattgagttatttgatgtgaacacaatcgccaacaaaattttaacagtcattgcccctggtttattagataaaagtcccatagtaagaggcagagccaaaatcttattcgaagaatatttggaaaaattggaaaaagaagcccaacttattcaaacaaacgatagtactgcagattctgaagatgtgaaagatattgattttgagaattacggttgtgatgaagaggatatgaataaagaagacaatttgttagccgcacaatttttaaataatttacgtttaaattctccctctgcaacaacaccaagtaacattaccgagagcgaaattgattccgcccaggatggaagtggatgggacgacctcagcgataccgatggctttattacaaatggtaccacagaatccttcgatgaaacaacaaaccctgtaacaaccgcaagcaccccaaaattattcggaaaacctattaaaattaataaaagttggaatgatgagttgaatgatgatggctggattcaagatgaaagcggcccatctaaggtgcctcaaaaacacacaaggccacaaaattctacgttggcaaaatccatcgctcctagcagtaggctttctatcaagaagaagaaaacaacgatcttggcaccaagaaacattgctagtaactctactgttaccaccaaatcttctttatccaataaaactgcaagaagtaagcctataagtagtatccgcggctctgtaaccaagaaaggaaatgttgacggctgggatgatgatggggattctgactcctgggatacgaattggtga

SEQ ID NO: 10353 - DNA, 2745 bp, Saccharomyces cerevisiae
atgcctcctccaactgcacagttcatgggccctacgcaggcgggacaaaatgaaagccaaaatcaatcatcaggcgaagctggggagcaaaaccaggagcatgggcaaggccctactcctattcttaatcaaagtcaaccggcttcttctcaaccgcaacatcaacaacaaaggaatgagtcgatttcatattatacaaatttcaaccagccacgatattccacggacgcctctatcaactcattcttgaacatatctgataacgtaccagtaacaagtacaggaggacctagttctggcggcgcctattccaatcttccacgattatccacttcaagtacacatcaaccgccagacctgtcgcaaatcggacgcggcttttccattgtaaacaacctcttcccacaacaacagcagcttcaaaatcagcatcggcaacagcagcaacaacaacaacagcagtcgcaccagcagcctcccttcaagaccccttcattttcgacgggattaacgggaagttcttctcaatatcaatttttaccaagaaatgataatacttcgcagccaccttcaaaaagaaactctgtttatcttggacctaatgatgggcctgattttgaatttttcagtatgcagcagtcacagcaaccgcagttccagcctagcagtagaagagaatcaaactctatgagacctccactgttaatacctgcagcaactactaaaagccagtccaatggcaccaataatagtgggaatatgaacacaaatgcagattatgaatcattttttaatactggtacaaacaacagtaattctaatcagaacccgtactttttgagttcaagaaataattctttgaagtttaatcctgaagatttcgattttcaattcaaaaggcggaattcttttgttagaggtactttggaccatagcagccaaaatgcgtttatacctgaatcaagattaaactcactatccgttaacaacaaagctaatggtgatcctgtcgcggataatgttaccaataacatgaaaggaaaaagtaatgaagttgacaatgatgatggcaatgacagtagcaataacaataacaacaacaacaacaacaacaacaatgaaaacaacaatgacaacaataatgataataacgacaatagtattaattccgccaccagtactaatatcccaaaccaagaggaccatagccttgcttctaccgataccacaagcaatagtaggaaagatctaaaagaaatagaacaaagacttcgaaaacatttgaatgatgaggataattactctagtgctatatcaagaccattggataaaaacgacgtaattgaaggcagtgagggattgaacaaacatatagacgagtctggtatgcaacctaatattatcaagaaaaggaaaaaggatgattctactgtgtacgtcaagaatgagatgccccgtactgatcccccgatgagtaaagacaattctacttctgctgaaggagcagcaatggcaaacttttctggtaaagaacctcctatacctgacataagttcagtaagtgatgatgctactaacctgataggtgcaacaaaggtcgaccaactaatgttgattattcaagcaagaaagaaaggtttcacggagaaagtaaataccactcaagatggagacttactgtttaaccaaacgatggacattttaccacctaaaagcgaactagtaggtggtgtggagaaaccaaaaggcacacaaaatacacgagcagttaaaaaacatgaatgtccctattgtcatcggcttttttcgcaagcgactcatctggaggttcacgttcgttctcatatagggtacaaaccattcgtttgtgattattgtggcaaacgttttactcagggtgggaacttaagaactcatgaacgactacacacaggtgaaaaaccgtattcatgtgatatttgtgataaaaaattttctaggaaagggaacttagctgctcacttggttactcaccaaaaattgaaaccatttgtttgcaagcttgaaaactgcaacaagaccttcactcaactaggaaatatgaaggcccatcaaaatagatttcataaggaaacattaaatgccttaacggcaaaattagctgagatgaatccatctgagaatattccacttgaagagcggcaacttttggagtactttgcgtccatttataaaaattcaaacaggggaattaaaggtagaggaaaaggtgtaggaaccaaaaaatcaacaatttcctcaccagaaaaccatcctgcgagcacaattttgaatccaaatacaaatgcaaataatgctattgctaatgattctgaaaataacggcaaccctgaaggtaacattgacagcagtagtaacagcaatccgggctcacatagtatgatttcgccgacgcaaaaagacatgggtacgttgcaatcacaatttatccaaaataattttaacaattctgtgaacagttcgaatccgtccaaccaaccaatcataaactacaattacaccacacttcctcattctagattaggaagtagtagttccagcaataccaacaataataacagcaacttttcggtaggtgcagctccgggtgtattaatggcgccaaccaccaataatgacttcagtttcaacttggatcaatctaatgataatgaaagatctcaacaagaacaagtgagatttaagaacattaattacaaaagctag

SEQ ID NO: 10354 - DNA, 2745 bp, Artificial Sequence
  Description of Artificial Sequence: Synthetic polynucleotide
atgcctcctccaactgcacagttcatgggccctacgcaggcgggacaaaatgaaagccaaaatcaatcttctggcgaagctggggagcaaaaccaggagcatgggcaaggccctactcctattcttaatcaaagtcaaccggcttcttctcaaccgcaacatcaacaacaaaggaatgagtctatttcttattatacaaatttcaaccagccaagatattccacggacgcctctatcaactctttcttgaacatatctgataacgtaccagtaacaagtacaggaggacctagttctggcggcgcctattccaatcttccaagattatccacttctagtacacatcaaccgccagacctttctcaaatcggacgcggcttttccattgtaaacaacctcttcccacaacaacagcagcttcaaaatcagcatagacaacagcagcaacaacaacaacagcagtctcaccagcagcctcccttcaagaccccttctttttctacgggattaacgggaagttcttctcaatatcaatttttaccaagaaatgataatacttctcagccaccttccaaaagaaactctgtttatcttggacctaatgatgggcctgattttgaatttttcagtatgcagcagtctcagcaaccgcagttccagcctagcagtagaagagaatctaactctatgagacctccattattaatacctgcagcaactactaaaagccagtccaatggcaccaataatagtgggaatatgaacacaaatgcagattatgaaagtttttttaatactggtacaaacaacagtaattctaatcagaacccgtactttttgagtagtagaaataattctttgaagtttaatcctgaagatttcgattttcaattcaaaaggagaaattcttttgttagaggtactttggaccatagcagccaaaatgcgtttatacctgaatctagattaaactctttatccgttaacaacaaagctaatggtgatcctgtcgcggataatgttaccaataacatgaaaggaaaaagtaatgaagttgacaatgatgatggcaatgacagtagcaataacaataacaacaacaacaacaacaacaacaatgaaaacaacaatgacaacaataatgataataacgacaatagtattaattccgccaccagtactaatatcccaaaccaagaggaccatagccttgcttctaccgataccacaagcaatagtaggaaagatttgaaagaaatagaacaaagacttagaaaacatttgaatgatgaggataattactctagtgctatatctagaccattggataaaaacgacgtaattgaaggcagtgagggattgaacaaacatatagacgagtctggtatgcaacctaatattatcaagaaaaggaaaaaggatgattctactgtgtacgtcaagaatgagatgccccgtactgatcccccgatgagtaaagacaattctacttctgctgaaggagcagcaatggcaaacttttctggtaaagaacctcctatacctgacataagttctgtaagtgatgatgctactaacttgataggtgcaacaaaggtcgaccaattgatgttgattattcaagcaagaaagaaaggtttcacggagaaagtaaataccactcaagatggagacttactttttaaccaaacgatggacattttaccacctaaaagcgaattggtaggtggtgtggagaaaccaaaaggcacacaaaatacaagagcagttaaaaaacatgaatgtccctattgtcatagacttttttctcaagcgactcatttagaggttcacgttcgttctcatatagggtacaaaccattcgtttgtgattattgtggcaaacgttttactcagggtgggaacttaagaactcatgaaagattgcacacaggtgaaaaaccgtattcttgtgatatttgtgataaaaaattttctaggaaagggaacttagctgctcacttggttactcaccaaaaattgaaaccatttgtttgcaagcttgaaaactgcaacaagaccttcactcaattaggaaatatgaaggcccatcaaaatagatttcataaggaaacattaaatgccttaacggcaaaattagctgagatgaatccatctgagaatattccacttgaagagagacaacttttggagtactttgcgtccatttataaaaatagcaacaggggaattaaaggtagaggaaaaggtgtaggaaccaaaaaatctacaatttcctctccagaaaaccatcctgcgagcacaattttgaatccaaatacaaatgcaaataatgctattgctaatgattctgaaaataacggcaaccctgaaggtaacattgacagcagtagtaacagcaatccgggctctcatagtatgatttctccgacgcaaaaagacatgggtacgttgcaatctcaatttatccaaaataattttaacaattctgtgaacagtagtaatccgtccaaccaaccaatcataaactacaattacaccacacttcctcattctagattaggaagtagtagttccagcaataccaacaataataacagcaactttagcgtaggtgcagctccgggtgtattaatggcgccaaccaccaataatgacttcagtttcaacttggatcaatctaatgataatgaaagatctcaacaagaacaagtgagatttaagaacattaattacaaaagctga

SEQ ID NO: 10355 - DNA, 885 bp, Saccharomyces cerevisiae
atgaaggctactttactgttgaaggcccagctctcacctgttagctatacgacgaagaaatctttccaaaggcaactcaatcgcactccatacactgcttttcaatacttcttccaacttgaagtccaaaagttacataacgtctcgaagtatgaggatattataaatcacgtaagagggaatagcaattttaaaagatttgcaaggaatgaatgggatagcatgtcattgactaagaaaagactttactatgcatccttttgccagtcaatggatattgacattttgaatgtcagtaaaattgaacttgccaaaagattagaaattcccataccagcaatgagtgaatatttgttatttagaaataagttcaaggtaaaatttgactctcattgcagctccttggagcgtaaagatcgtaaaagtgttccacgaccctctattactaggaaggttgcaactacagaaatatgttcaaaaagccgtagcaacacacccgtcggtaaaatcaacccccggaaacgattagtggcattgaaaaggatttcccgttcagagaacactgcaaaaaatcattcccatgaggctcaaaattacctttatgattatatgaaaaggtttcaacaaatgtgcaaagaatgccggtatgcttggaacgaagaggttgactatgaccagaaactagaaattagaaaaaaattacaggtatggagggcaaaatttgaggaaatgatggataacgagatacaaatattacaaaaaaacatggatatcatgtcaaagtttggtctcagaagtgagtcctatcttacagcagcgaatcacgatacaaatacacaaccaaataatattcttcccatgacgtacctactaaaaaagaaatga

SEQ ID NO: 10356 - DNA, 885 bp, Artificial Sequence
  Description of Artificial Sequence: Synthetic polynucleotide
atgaaggctactttattattgaaggcccagctctcccctgttagctatacgacgaagaaatctttccaaaggcaactcaatcgcactccatacactgcttttcaatacttcttccaacttgaagtccaaaagttacataacgtctccaagtatgaggatattataaatcacgtaagagggaatagcaattttaaaagatttgcaaggaatgaatgggatagcatgtctttgactaagaaaagactttactatgcatccttttgccagtccatggatattgacattttgaatgtcagtaaaattgaacttgccaaaagattagaaattcccataccagcaatgagtgaatatttgttatttagaaataagttcaaggtaaaatttgactctcattgcagctccttggagcgtaaagatcgtaaaagtgttccaagaccctctattactaggaaggttgcaactacagaaatatgttctaaaagccgtagcaacacacccgtcggtaaaatcaaccccagaaaaagattagtggcattgaaaaggatttcccgtagtgagaacactgcaaaaaatcattcccatgaggctcaaaattacctttatgattatatgaaaaggtttcaacaaatgtgcaaagaatgcagatatgcttggaacgaagaggttgactatgaccagaaattagaaattagaaaaaaattacaggtatggagggcaaaatttgaggaaatgatggataacgagatacaaatattacaaaaaaacatggatatcatgtccaagtttggtctcagaagtgagtcctatcttacagcagcgaatcacgatacaaatacacaaccaaataatattcttcccatgacgtacttgttgaaaaagaaatga

SEQ ID NO: 10357 - DNA, 807 bp, Saccharomyces cerevisiae
atgtcctctacacatagtaataatgtaggacatccccaatcttctccacaaggtccactaacggaacaacaaagagcacaacagcaatatcaaatttttgagaattcattaccaaaagtaagtcaatctgtgtatcagatgctgttgaacgagatggttcctctagctatgggcattgagaggcaaatatcaggcgatgttatcagttctgatagcaatgtaacttccgaaaatggtaacatcaacaatatgataaagagactgaagatagaggaacatcatacagtagatatcatacgttctcataacttgatacatgagctgtataaggcggatgaagaggaaaaagaaaaggttttagcaagactgaggaatattgggtttcaaatcggattgaagctgtcagagttattgatattttctaacaacccaaatttaaaattcaaggaaatggaccttctattaataatgaagttcatttgtagggatgtctggaaacaaatatttggtaaacagatcgataatttaaaaacaaaccacagaggaaccttttaccttcttgattatgactatcgacctattcaatcattttctttggaggaagatgcaaaaaacgaggagttaaaaatgatagaaccgtttttggagatacctgtgggaattattagaggcgtgttgtcttccttaggttattcatctgaagaggtcatttgcttggcgtcttttatcgacaggccaacagataggcctaaaacagcttttcccaagggagttagcttccatgttcaagtcacaatgccgcagtaa

SEQ ID NO: 10358 - DNA, 807 bp, Artificial Sequence
  Description of Artificial Sequence: Synthetic polynucleotide
atgtcctctacacatagtaataatgtaggacatccccaatcttctccacaaggtccattaacggaacaacaaagagcacaacagcaatatcaaatttttgagaattctttaccaaaagtaagtcaatctgtgtatcagatgcttttgaacgagatggttcctttggctatgggcattgagaggcaaatatctggcgatgttatcagttctgatagcaatgtaacttccgaaaatggtaacatcaacaatatgataaagagattaaagatagaggaacatcatacagtagatatcatacgttctcataacttgatacatgagttgtataaggcggatgaagaggaaaaagaaaaggttttagcaagattaaggaatattgggtttcaaatcggattgaagttatctgagttattgatattttctaacaacccaaatttaaaattcaaggaaatggaccttttattaataatgaagttcatttgtagggatgtctggaaacaaatatttggtaaacagatcgataatttaaaaacaaaccacagaggaaccttttaccttcttgattatgactataggcctattcaaagtttttctttggaggaagatgcaaaaaacgaggagttaaaaatgatagaaccgtttttggagatacctgtgggaattattagaggcgtgttgtcttccttaggttattcttctgaagaggtcatttgcttggcgtcttttatcgacaggccaacagataggcctaaaacagcttttcccaagggagttagcttccatgttcaagtcacaatgccgcagtga

SEQ ID NO: 10359 - DNA, 4383 bp, Saccharomyces cerevisiae
atgaaggaagtcgttgtaagtgaaaccccgaaaaggattaaagggctggaatttagcgctttaagcgctgccgatattgtcgcccagtctgaagtggaagtgtctacaagagatctcttcgatttagaaaaagatcgtgctcctaaggcgaacggtgctttagaccccaagatgggtgtctcttcctccagtcttgaatgtgcaacctgtcacggcaacttggcatcgtgtcatggccattttggtcacttaaaattagctttgcctgttttccacattgggtacttcaaagccaccattcaaatactgcaaggtatctgtaaaaactgttctgccatattgttatcagaaacagataaaagacaatttttgcatgaacttcgtcgtccaggcgtagataatttaagacgtatgggtatattgaagaagattttggaccaatgtaaaaagcaaagaaggtgtctgcattgtggtgctcttaatggtgtcgtgaaaaaagccgctgctggtgctggttcagccgcgttgaagattatccatgatacatttcgttgggtaggtaaaaagtccgctcctgaaaaggatatttgggtgggagaatggaaggaagttcttgctcataatccagaactagagcgttatgtgaaacgttgtatggatgatttaaatccactgaaaactttaaatcttttcaagcaaattaagtctgcagattgtgagctgcttggtatagatgcaacagttccctctggtagaccagagacttacatatggagatatttacccgcacctccggtttgtataaggccttccgttatgatgcaagactctccagcatctaacgaagatgacttgacagtaaagcttacggaaatagtttggacttcgtctttaatcaaagccggtcttgacaagggtatttccattaacaatatgatggaacattgggattacttacaactgactgttgcaatgtacatcaactcagactcagtcaatcctgcgatgctaccaggttcatccaatggcggcggaaaagtgaaaccaattagagggttctgccaaagactaaagggtaaacaaggtcgattcaggggtaatttgtctggtaagcgtgtcgatttttctggtagaactgttatttctccggacccaaacttgtccattgacgaggttgctgtcccagatcgtgttgcaaaagtcttgacgtatcccgaaaaggtaacaaggtataatagacataaattacaagaattaattgtaaatggacccaatgtccatcctggggcgaactatttactgaaaagaaacgaagatgcaagaagaaacctaagatatggtgatcgtatgaagttagccaaaaatttacaaattggtgatgtcgtcgaaagacatttagaagacggtgatgtggtcctattcaaccgtcaaccatctttgcatagattatcaattttatcgcattatgctaagattcgtccttggagaacctttagattaaatgaatgtgtttgcacaccttataacgctgacttcgacggtgacgaaatgaatttgcatgttccacaaaccgaagaggctcgtgcagaagctatcaatttaatgggtgtgaaaaataacttattaacacctaagtcaggtgaacctattattgcggctactcaagatttcataactggttcatatttaatatcacataaggattctttctatgatcgtgctacattaactcaactattgtctatgatgtctgacggtatcgagcactttgacataccacctcctgctatcatgaaaccgtattacttatggaccggtaaacaagttttttcacttttgataaaaccaaatcacaattccccagttgtgataaacttagacgcgaagaacaaagtctttgtccctccaaaatcaaaatccctaccaaatgaaatgtcacaaaacgacgggtttgtaattattagaggctctcaaattttaagtggggtgatggacaagtctgttctaggtgatggtaagaagcattctgtgttttatacgatattaagagattacggcccacaagaagccgctaatgctatgaatagaatggcaaaactatgtgctaggttcttaggtaatagagggttttctattggtattaatgatgtcacacctgctgatgatttgaagcaaaagaaggaagaactagtcgaaattgcataccataagtgtgacgaattgatcacattattcaataaaggtgaattagaaacacaacctggttgcaatgaagaacaaacattggaagctaagattggtgggcttctatctaaagtcagagaagaagttggtgatgtttgtattaatgaattagataattggaatgcaccattaattatggctacttgtggttctaaaggttccacattaaatgtttcacagatggtggctgtcgttggtcaacaaattatttctggtaatcgtgttccggatggttttcaagatcgttcgttaccgcatttccccaagaattcgaaaacaccccaatccaaaggttttgtaagaaattctttcttttcaggcttatctcccccagaatttctgttccatgctatttcgggtcgtgaaggtttagttgacacagctgttaaaaccgcagagactggttacatgtctcgtagattaatgaagtctttagaagatctttcttgtcagtatgacaatacggtcagaacttcagccaacggtatcgtccaattcacatatggtggtgacgggttggatcctctggaaatggaaggtaatgcacaaccggtcaatttcaatagaagttgggaccatgcatacaatattacttttaataaccaagataagggcttactaccctatgcaattatggaaactgcaaacgaaatattaggaccattggaggaaaggttggtcagatatgataatagtggatgtttagtgaaaagggaagacttgaataaagcggaatatgtggatcagtatgatgccgagagagatttttaccattccttaagagaatatattaatggcaaagcaactgctttggctaatttaagaaagtccaggggaatgttaggcctattagaacctcctgcaaaagaattacaaggtattgatccagatgaaaccgttcctgataatgttaaaacatctgtaagccaactttatagaatcagtgaaaaatcggtgagaaagtttttagaaattgctcttttcaaatatcgtaaggcaagactggagccaggtactgctattggtgctattggtgctcaatccattggtgaaccaggtacacaaatgacattgaagacctttcattttgcaggtgtggcttccatgaatgttacattaggtgttcctcgtatcaaagaaattatcaatgcttccaaggtcatttctacacctattataaatgctgtattagtaaatgataacgatgaaagggctgctagggttgttaaaggtagagtggaaaagacactgctatctgacgtagctttctatgtccaagatgtttacaaagacaacttgtctttcattcaagtgcgtattgatttaggtacgattgataaactacaattggagttgaccatagaagatatcgcggttgctataaccagggcttctaaattgaaaatacaagcctctgatgtcaatattattggtaaagatcgaattgcaatcaacgtattcccagaagggtacaaagcaaaatcgatatctacatctgcgaaagaaccaagtgagaatgatgttttttaccgaatgcaacagttacgtcgtgcgcttcctgatgttgttgttaaaggtttacctgatatttctcgtgcggttattaatattcgcgatgacggcaagagggaattattggttgaaggttacggcctgcgagatgtgatgtgtacagatggtgtcattggttctagaactacaactaaccatgttttagaagtcttttccgttttgggtatcgaagctgcaagatatagcattattagagaaattaactataccatgagtaatcacggtatgagtgtcgatccacgtcatatccaactattaggtgatgtgatgacatataagggtgaagtgttgggtattacaagatttggtttgagtaaaatgagggactctgttttgcagctagcctccttcgaaaagacaactgaccatttattcgatgcggccttttatatgaaaaaggacgctgttgaaggtgtttctgaatgtattattttgggtcaaacgatgtcgatcggtaccggttcctttaaagttgttaaaggtactaatatatctgaaaaggatctggttcctaagcgatgtctatttgaaagtctctcaaatgaggcagctttaaaagcgaactaa

SEQ ID NO: 10360 - DNA, 4383 bp, Artificial Sequence
  Description of Artificial Sequence: Synthetic polynucleotide
atgaaggaagtcgttgtaagtgaaaccccgaaaaggattaaagggttggaatttagcgctttaagcgctgccgatattgtcgcccagtctgaagtggaagtgtctacaagagatctcttcgatttagaaaaagatcgtgctcctaaggcgaacggtgctttagaccccaagatgggtgtctcttcctccagtcttgaatgtgcaacctgtcacggcaacttggcatcttgtcatggccattttggtcacttaaaattagctttgcctgttttccacattgggtacttcaaagccaccattcaaatattgcaaggtatctgtaaaaactgttctgccatattgttatctgaaacagataaaagacaatttttgcatgaacttcgtcgtccaggcgtagataatttaagacgtatgggtatattgaagaagattttggaccaatgtaaaaagcaaagaaggtgtttgcattgtggtgctcttaatggtgtcgtgaaaaaagccgctgctggtgctggttctgccgcgttgaagattatccatgatacatttcgttgggtaggtaaaaagtccgctcctgaaaaggatatttgggtgggagaatggaaggaagttcttgctcataatccagaattagagcgttatgtgaaacgttgtatggatgatttaaatccattgaaaactttaaatcttttcaagcaaattaagtctgcagattgtgagttgcttggtatagatgcaacagttccctctggtagaccagagacttacatatggagatatttacccgcacctccggtttgtataaggccttccgttatgatgcaagactctccagcatctaacgaagatgacttgacagtaaagcttacggaaatagtttggacttcttctttaatcaaagccggtcttgacaagggtatttccattaacaatatgatggaacattgggattacttacaattgactgttgcaatgtacatcaacagcgactctgtcaatcctgcgatgcttccaggttcttccaatggcggcggaaaagtgaaaccaattagagggttctgccaaagattaaagggtaaacaaggtagattcaggggtaatttgtctggtaagcgtgtcgatttttctggtagaactgttatttctccggacccaaacttgtccattgacgaggttgctgtcccagatcgtgttgcaaaagtcttgacgtatcccgaaaaggtaacaaggtataatagacataaattacaagaattaattgtaaatggacccaatgtccatcctggggcgaactatttattgaaaagaaacgaagatgcaagaagaaacttgagatatggtgatcgtatgaagttagccaaaaatttacaaattggtgatgtcgtcgaaagacatttagaagacggtgatgtggtccttttcaaccgtcaaccatctttgcatagattatccattttatctcattatgctaagattcgtccttggagaacctttagattaaatgaatgtgtttgcacaccttataacgctgacttcgacggtgacgaaatgaatttgcatgttccacaaaccgaagaggctcgtgcagaagctatcaatttaatgggtgtgaaaaataacttattaacacctaagtctggtgaacctattattgcggctactcaagatttcataactggttcttatttaatatctcataaggattctttctatgatcgtgctacattaactcaattattgtctatgatgtctgacggtatcgagcactttgacataccacctcctgctatcatgaaaccgtattacttatggaccggtaaacaagttttttcccttttgataaaaccaaatcacaattccccagttgtgataaacttagacgcgaagaacaaagtctttgtccctccaaaatctaaatccttgccaaatgaaatgtctcaaaacgacgggtttgtaattattagaggctctcaaattttaagtggggtgatggacaagtctgttttaggtgatggtaagaagcattctgtgttttatacgatattaagagattacggcccacaagaagccgctaatgctatgaatagaatggcaaaattatgtgctaggttcttaggtaatagagggttttctattggtattaatgatgtcacacctgctgatgatttgaagcaaaagaaggaagaattggtcgaaattgcataccataagtgtgacgaattgatcacattattcaataaaggtgaattagaaacacaacctggttgcaatgaagaacaaacattggaagctaagattggtgggcttttatctaaagtcagagaagaagttggtgatgtttgtattaatgaattagataattggaatgcaccattaattatggctacttgtggttctaaaggttccacattaaatgtttctcagatggtggctgtcgttggtcaacaaattatttctggtaatcgtgttccggatggttttcaagatcgttccttaccgcatttccccaagaattctaaaacaccccaatccaaaggttttgtaagaaattctttcttttctggcttatctcccccagaatttcttttccatgctatttctggtcgtgaaggtttagttgacacagctgttaaaaccgcagagactggttacatgtctcgtagattaatgaagtctttagaagatctttcttgtcagtatgacaatacggtcagaacttctgccaacggtatcgtccaattcacatatggtggtgacgggttggatcctttggaaatggaaggtaatgcacaaccggtcaatttcaatagaagttgggaccatgcatacaatattacttttaataaccaagataagggcttattgccctatgcaattatggaaactgcaaacgaaatattaggaccattggaggaaaggttggtcagatatgataatagtggatgtttagtgaaaagggaagacttgaataaagcggaatatgtggatcagtatgatgccgagagagatttttaccattccttaagagaatatattaatggcaaagcaactgctttggctaatttaagaaagtccaggggaatgttaggcttattagaacctcctgcaaaagaattacaaggtattgatccagatgaaaccgttcctgataatgttaaaacatctgtaagccaactttatagaatcagtgaaaaatctgtgagaaagtttttagaaattgctcttttcaaatatcgtaaggcaagattggagccaggtactgctattggtgctattggtgctcaatccattggtgaaccaggtacacaaatgacattgaagacctttcattttgcaggtgtggcttccatgaatgttacattaggtgttcctcgtatcaaagaaattatcaatgcttccaaggtcatttctacacctattataaatgctgtattagtaaatgataacgatgaaagggctgctagggttgttaaaggtagagtggaaaagacattgttatctgacgtagctttctatgtccaagatgtttacaaagacaacttgtctttcattcaagtgcgtattgatttaggtacgattgataaattacaattggagttgaccatagaagatatcgcggttgctataaccagggcttctaaattgaaaatacaagcctctgatgtcaatattattggtaaagatagaattgcaatcaacgtattcccagaagggtacaaagcaaaatctatatctacatctgcgaaagaaccaagtgagaatgatgttttttacagaatgcaacagttacgtcgtgcgcttcctgatgttgttgttaaaggtttacctgatatttctcgtgcggttattaatattcgcgatgacggcaagagggaattattggttgaaggttacggccttagagatgtgatgtgtacagatggtgtcattggttctagaactacaactaaccatgttttagaagtcttttccgttttgggtatcgaagctgcaagatatagcattattagagaaattaactataccatgagtaatcacggtatgagtgtcgatccacgtcatatccaattattaggtgatgtgatgacatataagggtgaagtgttgggtattacaagatttggtttgagtaaaatgagggactctgttttgcagttggcctccttcgaaaagacaactgaccatttattcgatgcggccttttatatgaaaaaggacgctgttgaaggtgtttctgaatgtattattttgggtcaaacgatgtccatcggtaccggttcctttaaagttgttaaaggtactaatatatctgaaaaggatttggttcctaagagatgtttatttgaaagtctctctaatgaggcagctttaaaagcgaactga

SEQ ID NO: 10361 - DNA, 1305 bp, Saccharomyces cerevisiae
atggccaccttggaagaattggatgctcaaactttaccaggagacgatgaattagatcaagagattttgaatctttcgacgcaggagcttcaaacaagagccaagctcttggacaatgaaattcgtatttttagatctgaattgcaaagactgtcccatgaaaacaacgttatgctcgagaagattaaggacaataaggaaaaaatcaagaataatagacagttaccgtaccttgtggctaacgttgtcgaggtcatggatatgaatgagattgaagacaaagaaaatagtgaatctactacacaaggtggtaatgtcaacttagataacaccgctgttggcaaagctgctgtagtcaagacttcttctagacagactgttttcttgcccatggtcggtttagtagatcctgataaacttaagccaaatgacctggtaggtgtgaataaagactcgtatttgattttggatactttaccctctgaatttgattctcgtgtaaaagctatggaggtagatgaaaaacccacagaaacttactcggacgtgggtgggttggataaacagattgaagagctggtggaggccattgtgttacctatgaaacgtgcagataaattcaaagatatgggaattagagcgcccaagggtgccctaatgtacgggcctccgggtacaggtaaaactttattagctcgtgcttgcgcggctcagacgaatgctacttttttgaagctggcagcacctcaattggtacaaatgtatatcggtgaaggtgctaaactagtccgcgatgcttttgcactggccaaggaaaaggcaccaactattattttcattgacgaattggatgccattggtactaagagatttgattctgaaaaatccggtgatagggaagtgcaaagaaccatgctggaattattgaatcaattggatggctttagctccgatgatcgtgtcaaagtcttggcggctaccaatagagttgatgttttagatcctgctttgttaagatcaggaagattggatagaaaaattgaattcccactcccatccgaagactcgagagctcaaattttacaaattcattcaagaaaaatgaccactgatgatgatattaactggcaagaacttgccaggtctactgatgagtttaatggtgcccagttaaaggcggtaactgtggaggcaggtatgattgccttaaggaatgggcaatcttccgttaaacacgaagatttcgttgagggtataagtgaagttcaagcaagaaaatcgaaatcggtatccttttatgcataa

SEQ ID NO: 10362 - DNA, 1305 bp, Artificial Sequence
  Description of Artificial Sequence: Synthetic polynucleotide
atggccaccttggaagaattggatgctcaaactttaccaggagacgatgaattagatcaagagattttgaatctttctacgcaggagcttcaaacaagagccaagctcttggacaatgaaattcgtatttttagatctgaattgcaaagattatcccatgaaaacaacgttatgctcgagaagattaaggacaataaggaaaaaatcaagaataatagacagttaccgtaccttgtggctaacgttgtcgaggtcatggatatgaatgagattgaagacaaagaaaatagtgaatctactacacaaggtggtaatgtcaacttagataacaccgctgttggcaaagctgctgtagtcaagacttcttctagacagactgttttcttgcccatggtcggtttagtagatcctgataaacttaagccaaatgacttggtaggtgtgaataaagactcttatttgattttggatactttaccctctgaatttgattctcgtgtaaaagctatggaggtagatgaaaaacccacagaaacttacagtgacgtgggtgggttggataaacagattgaagagttggtggaggccattgtgttacctatgaaacgtgcagataaattcaaagatatgggaattagagcgcccaagggtgccttgatgtacgggcctccgggtacaggtaaaactttattagctcgtgcttgcgcggctcagacgaatgctacttttttgaagttagcagcacctcaattggtacaaatgtatatcggtgaaggtgctaaattggtccgcgatgcttttgcattggccaaggaaaaggcaccaactattattttcattgacgaattggatgccattggtactaagagatttgattctgaaaaatccggtgatagggaagtgcaaagaaccatgttggaattattgaatcaattggatggctttagctccgatgatcgtgtcaaagtcttggcggctaccaatagagttgatgttttagatcctgctttgttaagatctggaagattggatagaaaaattgaattcccactcccatccgaagacagtagagctcaaattttacaaattcattccagaaaaatgaccactgatgatgatattaactggcaagaacttgccaggtctactgatgagtttaatggtgcccagttaaaggcggtaactgtggaggcaggtatgattgccttaaggaatgggcaatcttccgttaaacacgaagatttcgttgagggtataagtgaagttcaagcaagaaaatctaaatctgtatccttttatgcatga

SEQ ID NO: 10363 - DNA, 1704 bp, Saccharomyces cerevisiae
atgggacagtcttcttcaatcagttccagtaacgaagagggttcttcccactcaaaaaaattcacaaatagcaaagatattttggcatatttcaataacaaagcacagcaacaggtcactattccagaattagtcagttttaagggaaatttgcaaattgaagatctaaacactccaatttctcacaaagctttatgcaactcactttattttccgcagaatcatgccatgattgttgggatagtgactaacatgttgagggttttgagcaacttcccattaatgaaatcatcttacgaaccaattacgggatatgggttattaaaatgcattttgttgttaaacagggcacgatgtgccaaattcttgaaaaccaagtcctatgatcaactaaaactgctgtttatctctttatcacttcagaaaactgacaaagaagaactctccgaagaaagtgaaaacgacggaaacaaggagttgactataaaacaaataataactgggtttgatgatgttgatacagaaatgctgtgcattcctgctgattttatgcttcagtttttaacttggcttttaattttaacagttgattgtccaaccaccaattctaaattggataatacagagactcatgatcaatggggcaatttcaaagtctcagcactcaatctccttagaactatgaatccagacgtggtgggcgatatagaatcacattccataacgtttcaacaattttcaactgcaataagaactgtaatgcccaatctattaaaaccattagagaatttaatggagcattttttttatttgcagcacgatttagttgatcatgacacaaacttatcgtctattcaggattctaaagttatgactccagcactgttggcacagttatcgacgggactaccaaaggaattatttattcataagctacaaagtttatacatcggcaggaaaagtggcttctcaatgaggtctttgcaagcaaaggtgttcaaatggatggcgccttcgattttagttgttagcggaatgaggataacaaattctgaagaatacgcagctgagaagaatccaagataccgccattttcttgaagaatttcctaaattgaaagagtcagatcaaatgatggatgcatcgcatttgaataaaaggaaaactactttcgctgtgtacatagacgatccgtggaaagtaacaaataaagattattttggcgatctgaatacgagaataatagaaatatcacccaggcaggatatttataaagtcaaccaaaaaggcacgatctatttcaatacaattggtggcggaattggaatcggggataaacaaccattaataaaaccagcatccaagagatacataccagggaacgtgtcgcttacttttgacagcacattagaatttgctgtgtttagaaatactggttacggaggttcattagaccctggtttattgtcgatggaaagaaaggaggaaaattccccttatgaattgcattttttgattcaagatgttgaggtatggggctgtggtggtgagaaagaactagaagagcaaatcaaacagttggaatgggaagaagcagaatctaaaagaagacagcaaattaacctgagaagcttgggagaagaccgtgccttactggaaatggcaggtttagttggccaacatcaaggtggcggttcaatgtga

SEQ ID NO: 10364 - DNA, 1704 bp, Artificial Sequence
  Description of Artificial Sequence: Synthetic polynucleotide
atgggacagtcttcttctatcagttccagtaacgaagagggttcttcccactctaaaaaattcacaaatagcaaagatattttggcatatttcaataacaaagcacagcaacaggtcactattccagaattagtcagttttaagggaaatttgcaaattgaagatttgaacactccaatttctcacaaagctttatgcaactctctttattttccgcagaatcatgccatgattgttgggatagtgactaacatgttgagggttttgagcaacttcccattaatgaaatcttcttacgaaccaattacgggatatgggttattaaaatgcattttgttgttaaacagggcaagatgtgccaaattcttgaaaaccaagtcctatgatcaattgaaattactttttatctctttatctcttcagaaaactgacaaagaagaactctccgaagaaagtgaaaacgacggaaacaaggagttgactataaaacaaataataactgggtttgatgatgttgatacagaaatgttgtgcattcctgctgattttatgcttcagtttttaacttggcttttaattttaacagttgattgtccaaccaccaattctaaattggataatacagagactcatgatcaatggggcaatttcaaagtctctgcactcaatctccttagaactatgaatccagacgtggtgggcgatatagaaagtcattccataacgtttcaacaattttccactgcaataagaactgtaatgcccaatttattaaaaccattagagaatttaatggagcattttttttatttgcagcacgatttagttgatcatgacacaaacttatcttctattcaggattctaaagttatgactccagcattattggcacagttatctacgggattaccaaaggaattatttattcataagttacaaagtttatacatcggcaggaaaagtggcttctccatgaggtctttgcaagcaaaggtgttcaaatggatggcgccttctattttagttgttagcggaatgaggataacaaattctgaagaatacgcagctgagaagaatccaagataccgccattttcttgaagaatttcctaaattgaaagagtctgatcaaatgatggatgcatctcatttgaataaaaggaaaactactttcgctgtgtacatagacgatccgtggaaagtaacaaataaagattattttggcgatttgaatacgagaataatagaaatatctcccaggcaggatatttataaagtcaaccaaaaaggcacgatctatttcaatacaattggtggcggaattggaatcggggataaacaaccattaataaaaccagcatccaagagatacataccagggaacgtgtctcttacttttgacagcacattagaatttgctgtgtttagaaatactggttacggaggttctttagaccctggtttattgtccatggaaagaaaggaggaaaattccccttatgaattgcattttttgattcaagatgttgaggtatggggctgtggtggtgagaaagaattggaagagcaaatcaaacagttggaatgggaagaagcagaatctaaaagaagacagcaaattaacttgagaagcttgggagaagaccgtgccttattggaaatggcaggtttagttggccaacatcaaggtggcggttctatgtga

SEQ ID NO: 10365 - DNA, 1455 bp, Saccharomyces cerevisiae
atgtccttggaagataaatttgattcattgtctgtgtcgcaaggtgcctcggaccatattaataatcagctcttagagaagtatagtcacaaaataaaaactgatgaattatcattcagcagagcgaaaacatcaaaggataaagcaaatagggcgactgtggaaaatgtcttagatccgagaactatgagatttttgaagtctatggtcaccagaggtgtgattgcagatttgaacggttgcttaagtactgggaaagaagctaatgtttaccacgcttttgcaggtaccggtaaggcacccgtaatagatgaggaaacaggccagtatgaagttttagagacagacggatcccgtgcagaatatgccattaagatttataagacctctatcctagtcttcaaagatcgtgaaagatatgttgatggtgaatttagatttagaaattccagatctcaacataatccaaggaaaatgattaaaatttgggctgaaaaggaatttaggaacctgaaaagaatttatcaaagtggcgtcattccagctcctaagccaatagaagttaagaacaacgtcttagttatggaatttttaagccgaggtaatggatttgcctcacctaaattaaaagattatccgtacaagaatcgtgatgaaattttccattattatcacacaatggtggcatatatgagattgctgtaccaagtttgtcgcctggttcatgccgatttgtcagagtataacaccatagttcatgatgataaactatatatgatcgatgtttcccaaagtgtggaacctgaacatccaatgagtttagattttttaaggatggatatcaaaaacgttaacctttatttcgagaagatgggtataagtattttccctgaaagggttatttttcaatttgtcatatcagaaactttggagaaatttaaaggtgattataacaatattagcgccttggttgcatacattgctagtaatctaccaataaaatctacagaacaagatgaggcagaagatgaaatattcagatcgctgcatttagttagatcattgggtggattagaggaaagagattttgataggtatactgatggtaagtttgacttactgaaaagcttgattgcccatgataatgaacgcaattttgctgcttctgagcaatttgaatttgataacgctgaccacgaatgtagttctggcacagaggaattctcagatgatgaagaagacggctcaagcggatctgaagaagatgacgaggaggagggcgagtactatgacgatgatgaaccaaaagttttaaaggggaagaaacatgaggacaaggatttaaaaaaattgcgcaagcaggaagctaaagatgcaaaaagagaaaaaaggaaaacaaaagtcaagaagcacatcaagaaaaaattggtgaaaaaaacgaaatcaaagaaataa

SEQ ID NO: 10366 - DNA, 1455 bp, Artificial Sequence
  Description of Artificial Sequence: Synthetic polynucleotide
atgtccttggaagataaatttgattctttgtctgtgagtcaaggtgccagtgaccatattaataatcagctcttagagaagtatagtcacaaaataaaaactgatgaattatctttcagcagagcgaaaacatccaaggataaagcaaatagggcgactgtggaaaatgtcttagatccgagaactatgagatttttgaagtctatggtcaccagaggtgtgattgcagatttgaacggttgcttaagtactgggaaagaagctaatgtttaccacgcttttgcaggtaccggtaaggcacccgtaatagatgaggaaacaggccagtatgaagttttagagacagacggatcccgtgcagaatatgccattaagatttataagacctctatcctcgtcttcaaagatcgtgaaagatatgttgatggtgaatttagatttagaaattccagatctcaacataatccaaggaaaatgattaaaatttgggctgaaaaggaatttaggaacttgaaaagaatttatcaaagtggcgtcattccagctcctaagccaatagaagttaagaacaacgtcttagttatggaatttttaagcagaggtaatggatttgcctctcctaaattaaaagattatccgtacaagaatcgtgatgaaattttccattattatcacacaatggtggcatatatgagattgttgtaccaagtttgtcgccttgttcatgccgatttgagtgagtataacaccatagttcatgatgataaactttatatgatcgatgtttcccaaagtgtggaacctgaacatccaatgagtttagattttttaaggatggatatcaaaaacgttaacctttatttcgagaagatgggtataagtattttccctgaaagggttatttttcaatttgtcatatctgaaactttggagaaatttaaaggtgattataacaatattagcgccttggttgcatacattgctagtaatttaccaataaaatctacagaacaagatgaggcagaagatgaaatattcagatctttgcatttagttagaagtttgggtggattagaggaaagagattttgataggtatactgatggtaagtttgacttattgaaaagcttgattgcccatgataatgaacgcaattttgctgcttctgagcaatttgaatttgataacgctgaccacgaatgtagttctggcacagaggaattcagtgatgatgaagaagacggcagtagcggatctgaagaagatgacgaggaggagggcgagtactatgacgatgatgaaccaaaagttttaaaggggaagaaacatgaggacaaggatttaaaaaaattgcgcaagcaggaagctaaagatgcaaaaagagaaaaaaggaaaacaaaagtcaagaagcacatcaagaaaaaattggtgaaaaaaacgaaatccaagaaatga

SEQ ID NO: 10367 - DNA, 939 bp, Saccharomyces cerevisiae
atgcctgctactttacatgattctacgaaaatcctttctctaaatactggagcccaaatccctcaaataggtttaggtacgtggcagtcgaaagagaacgatgcttataaggctgttttaaccgctttgaaagatggctaccgacacattgatactgctgctatttaccgtaatgaagaccaagtcggtcaagccatcaaggattcaggtgttcctcgggaagaaatctttgttactacaaagttatggtgtacacaacaccacgaacctgaagtagcgctggatcaatcactaaagaggttaggattggactacgtagacttatatttgatgcattggcctgccagattagatccagcctacatcaaaaatgaagacatcttgagtgtgccaacaaagaaggatggttctcgtgcagtggatatcaccaattggaatttcatcaaaacctgggaattaatgcaggaactaccaaagactggtaaaactaaggccgttggagtctccaacttttctataaataacctgaaagatctattagcatctcaaggtaataagcttacgccagctgctaaccaagtcgaaatacatccattactacctcaagacgaattgattaatttttgtaaaagtaaaggcattgtggttgaagcttattctccgttaggtagtaccgatgctccactattgaaggaaccggttatccttgaaattgcgaagaaaaataacgttcaacccggacacgttgttattagctggcacgtccaaagaggttatgttgtcttgccaaaatctgtgaatcccgatcgaatcaaaacgaacaggaaaatatttactttgtctactgaggactttgaagctatcaataacatatcgaaggaaaagggcgaaaaaagggttgtacatccaaattggtctcctttcgaagtattcaagtaa

SEQ ID NO: 10368 - DNA, 939 bp, Artificial Sequence
  Description of Artificial Sequence: Synthetic polynucleotide
atgcctgctactttacatgattctacgaaaatcctttctttgaatactggagcccaaatccctcaaataggtttaggtacgtggcagtccaaagagaacgatgcttataaggctgttttaaccgctttgaaagatggctacagacacattgatactgctgctatttaccgtaatgaagaccaagtcggtcaagccatcaaggattctggtgttcctagagaagaaatctttgttactacaaagttatggtgtacacaacaccacgaacctgaagtagcgttggatcaatctttgaagaggttaggattggactacgtagacttatatttgatgcattggcctgccagattagatccagcctacatcaaaaatgaagacatcttgagtgtgccaacaaagaaggatggttctcgtgcagtggatatcaccaattggaatttcatcaaaacctgggaattaatgcaggaattaccaaagactggtaaaactaaggccgttggagtctccaacttttctataaataacttgaaagatttattagcatctcaaggtaataagcttacgccagctgctaaccaagtcgaaatacatccattattgcctcaagacgaattgattaatttttgtaaaagtaaaggcattgtggttgaagcttattctccgttaggtagtaccgatgctccattgttgaaggaaccggttatccttgaaattgcgaagaaaaataacgttcaacccggacacgttgttattagctggcacgtccaaagaggttatgttgtcttgccaaaatctgtgaatcccgatagaatcaaaacgaacaggaaaatatttactttgtctactgaggactttgaagctatcaataacatatccaaggaaaagggcgaaaaaagggttgtacatccaaattggtctcctttcgaagtattcaagtga

SEQ ID NO: 10369 - DNA, 381 bp, Saccharomyces cerevisiae
atgtcttggcaagcatacactgataacttaataggaaccggtaaagtcgacaaagctgtcatctactcgagagcaggtgacgctgtttgggctacttctggtggcctatctttgcaaccaaacgaaattggtgaaattgttcaaggcttcgacaatccagctggtttgcaaagcaatggtttgcatattcaaggccaaaagttcatgttgttgagagctgacgatagaagtatctacggtagacatgatgctgagggtgttgtttgtgtaagaactaagcaaaccgttattattgctcattatccaccaaccgtacaagccggtgaggccaccaagattgtcgagcaattggctgactacttgattggtgttcaatactaa

SEQ ID NO: 10370 - DNA, 381 bp, Artificial Sequence
  Description of Artificial Sequence: Synthetic polynucleotide
atgtcttggcaagcatacactgataacttaataggaaccggtaaagtcgacaaagctgtcatctactctagagcaggtgacgctgtttgggctacttctggtggcttatctttgcaaccaaacgaaattggtgaaattgttcaaggcttcgacaatccagctggtttgcaaagcaatggtttgcatattcaaggccaaaagttcatgttgttgagagctgacgatagaagtatctacggtagacatgatgctgagggtgttgtttgtgtaagaactaagcaaaccgttattattgctcattatccaccaaccgtacaagccggtgaggccaccaagattgtcgagcaattggctgactacttgattggtgttcaatactga

SEQ ID NO: 10371 - DNA, 1395 bp, Saccharomyces cerevisiae
atgtcatctgaaagcccacaggatcaaccacagaaggagcaaatcagcaataacgtcggcgttaccaccaatagtacaagcaatgaggaaacaagccgctctcaagatgataatgtcaaggaagtcaatggaaatgatgatactaaagaagaggaacaagaagaagacgcagaactagatgatttatttggagatgacaatgatgacgatgatgatgatgatgttaaaaaatcggagactgaaaaaagtgatagtgatagtgatgaagacgacgagggagagaatatcaaccatagaagtcgtcatagagaaagtctcgggttagatgatgatgaagcagaggagcaagccatgtacacccgaaaattttatggtgaggatgctaataacttttctgatcaagatgagactactcacacttttaaagaggaaaatgtagagcttgtcagacatattattccaagtaaagctaatgtgaatgaaacggcgtctcacaacgaaattttctatgctagaattcccaactttttaactatcgatccaattcctttcgaccctccaagttttgaggccaaagtaaacgaaagggcaagcaattcagcttctagggaggatcaactggacgaccgcctgattgatgaaaacactgttagatggagatactctcgtgacaaagaccaacatgtctttaaagaatcaaatacacaaatagtgcagtggtcagacggtacatattcgctaaaagttggtgaagagtgtacagatatattggtcaacgatacgagcaacacttttttgacagtatcgcatgaccaacaagagttgatccagtgttacgaagggggtgaaataaaaaagacgttgatgtttattccaacttcgacgaattcaaaaatacatcaaaaactaagtaaagctgttataagaaggaaccaaagacaaagcaagggtcctggaacatacattgtaagtatggatcctgaagtggaaaagaaggagttagagagaaagcaaagccagattttaagagacagaaggagaagacagctcaaagaaaaggagaaacaagaatccccagatgccgcttttgagacgggatttagaaagcaaaattcacccactacctatggagcctcgagaagaaatgaatatgaagaagatgactttttagtcgacgacgatgaggaagaggaggctgcgtttgacgacgaagaggatgataatgaggaagaagaagaagaagaggacgcggatgaagagaacgcctctcgtctaagaaatttaaaaagagaaggagcagcaatgtacagagaagaggaagaagaagaaaaagataggagcgagacaaaaagaagaagggttgcggtcatcgaggacgacgaagacgaggattag

SEQ ID NO: 10372 - DNA, 1395 bp, Artificial Sequence
  Description of Artificial Sequence: Synthetic polynucleotide
atgtcttctgaaagcccacaggatcaaccacagaaggagcaaatcagcaataacgtcggcgttaccaccaatagtacaagcaatgaggaaacaagccgctctcaagatgataatgtcaaggaagtcaatggaaatgatgatactaaagaagaggaacaagaagaagacgcagaattagatgatttatttggagatgacaatgatgacgatgatgatgatgatgttaaaaaaagtgagactgaaaaaagtgatagtgatagtgatgaagacgacgagggagagaatatcaaccatagaagtcgtcatagagaaagtctcgggttagatgatgatgaagcagaggagcaagccatgtacaccagaaaattttatggtgaggatgctaataacttttctgatcaagatgagactactcacacttttaaagaggaaaatgtagagcttgtcagacatattattccaagtaaagctaatgtgaatgaaacggcgtctcacaacgaaattttctatgctagaattcccaactttttaactatcgatccaattcctttcgaccctccaagttttgaggccaaagtaaacgaaagggcaagcaattctgcttctagggaggatcaattggacgaccgcttaattgatgaaaacactgttagatggagatactctcgtgacaaagaccaacatgtctttaaagaaagtaatacacaaatagtgcagtggtctgacggtacatattctttgaaagttggtgaagagtgtacagatatattggtcaacgatacgagcaacacttttttgacagtatctcatgaccaacaagagttgatccagtgttacgaagggggtgaaataaaaaagacgttgatgtttattccaacttccacgaattctaaaatacatcaaaaattaagtaaagctgttataagaaggaaccaaagacaaagcaagggtcctggaacatacattgtaagtatggatcctgaagtggaaaagaaggagttagagagaaagcaaagccagattttaagagacagaaggagaagacagctcaaagaaaaggagaaacaagaatccccagatgccgcttttgagacgggatttagaaagcaaaattctcccactacctatggagcctctagaagaaatgaatatgaagaagatgactttttagtcgacgacgatgaggaagaggaggctgcgtttgacgacgaagaggatgataatgaggaagaagaagaagaagaggacgcggatgaagagaacgcctctcgtttaagaaatttaaaaagagaaggagcagcaatgtacagagaagaggaagaagaagaaaaagataggagcgagacaaaaagaagaagggttgcggtcatcgaggacgacgaagacgaggattga

SEQ ID NO: 10373 - DNA, 3819 bp, Saccharomyces cerevisiae
atgccgaacgaagataatgaacttcaaaaagcaattgagaaccatcataatcaactactaaaccaggataaagaaaatgctgacagaaatgggtctgttatagaagacctcccattatacgggacaagtataaaccagcagtctacccctggagatgttgacgatggaaaacacttactgtatccagatattgccaccaacctaccactgaagacttctgacagacttttggacgatatactttgcgatactatttttctcaattctacagacccgaaggtcatgcaaaagggcctgcaatcgaggggtattttaaaagagtctatgctttcttactcaactttcagaagtagtattcgccctaactgcttgggttcattaactgatcaagtggtttttcaaacaaaatccgagtatgattccatttcatgcccaaaatataataaaatacatgtatttcaggcggtcatctttaatccatcactggcagaacagcaaatttcaacttttgatgatattgttaaaattcctatttatcatcttaaggttagcgtaaaagtccgccaagaactggagcggttgaagaagcatgtcggtgttactcaattccactcactagatcatttgcacgaatacgatcgagtagacctttcgacttttgattcttccgatcctaatttgttggattacggtatttacgtttctgatgatactaacaaactgatcttgattgaaatttttaaacccgagtttaattcacctgaagagcatgagagttttactgccgacgcaattaagaagagatacaatgctatgtgtgtaaaaaatgaatcactagataaaagcgagacgccatctcaagttgactgtttttacacactttttaaaatttttaaagggcctttgacgaggaaaagtaaagcggaacctacaaagacaattgattctggaaatttggcccttaacactcacctgaatcctgaatggttaacgtccaagtatggatttcaagcaagctcagaaatcgatgaggaaactaatgagatatttactgaatacgtccctccagatatggtggactatgtaaacgatttggagacaagaaaaattcgagaatcgtttgtgaggaagtgtttacaactgatattttggggtcaactatctacctcattactggcacctaattctcccttgaaaaatacgaaaagcgtaaagggaatgtcttcattacaaacttctttctcaacactaccttggttccatttattgggagaatccagagcaaggattctattaaattccaatgagcaaactcattcgcctttggacgcagaacctcattttattaatctttccgtttcgcattattataccgatagagatataatcagaaactacgaatctttgtcttctttggatcctgaaaatattgggctgtattttgacgcactgacatacattgcaaataggaagggggcatatcaattgattgcttactgtggaaaacaggacattataggccaagaagctctagaaaatgctttgttaatgtttaaaattaaccctaaagagtgtaacatctccgaattaaatgaggcgactttgctatctatttacaaatatgaaacatcaaataagagccaagtaacctctaatcacctaacaaatttgaaaaatgctctaagattgttggccaaatataccaaatctgacaaactaaaattttacgtcgatcatgagccctacagagctttatcccaggcatacgacacactttcaattgacgagtctgttgatgaagacattataaaaactgcatattcggtcaagattaacgactctcccggattaaagttggattgtgatagagcactttacaccattgctatcagtaaaagaagccttgatttgttcaattttttaacagaggaatgcccacagttttccaactattatggtccagagaagcttgattaccaagaggcattgaagcttcttcaagtgaatgaaaatgcctctgacgaaaccattttgaaaatctttaaacaaaagtggtttgatgaaaacgtttatgagcctgaccaatttcttattttgagggcagcattgaccaaaatcagtatagaaagaaattcaactttaatcaccaacttcttactaactggtacgatagatccaaattccttgccgccagaaaattggccaactggcattaataatatcgggaacacctgttacctaaattctttattacaatattacttttccattgcgccactaagaagatatgtattggaatatcaaaaaacggtagaaaatttcaatgaccacctctctaatagtgggcatattagaagaattggtggaagagaaattagtagaggcgaagtggaaagatctattcaattcatataccaacttcgcaaccttttctatgcgatggttcatacaagagaaagatgtgtaacaccctcaaaagagctagcatatttggcatttgctccaagtaatgttgaagtagaatttgaagtggaaggcaataaagtagttgatcaaacaggagttctttcggattcaaagaaggaaacaacggatgacgcatttactacaaaaataaaggatacaagcctgattgatttagaaatggaagatggccttaatggcgatgttggtacagatgcgaacagaaaaaaaaatgaatcgaatgatgctgaagtaagtgagaacgaagatacaacaggattaacttcacctacgcgtgtggcaaaaatcagttctgatcaattagaaaatgctttggaaatgggtaggcaacaagatgttactgaatgcataggaaacgtgttatttcagatagaaagcggttcagagcctatccgatatgatgaagacaacgagcaatatgacttggttaagcaactattttatggtactactaaacaaagtattgttcctttgtccgcaacaaataaagtccgtacgaaagttgaaagattcctatcgttactgataaatattggcgatcatcctaaagatatttatgatgcgtttgattcttattttaaagacgaatatctgacaatggaagagtatggtgatgttatacgtaccgttgctgttacaacttttcctactattttgcaggtacaaatccaaagagtttattacgatcgtgaaagattaatgccgtttaaatccattgagcccttaccattcaaagaagttatttacatggacagatacgcggatacagagaaccctttattgttggcaaaaaagaaagaaacagaagaaatgaagcaaaagttgaaggtaatgaaaaatagacaaagagagcttttgagtcgtgatgattcagggcttacaaggaaggatgcatttttggagagtatcaagctattggaatcggataccataaagaaaactcctttaaaaattgaggctgctaatgatgtgataaagacgctgagaaacaacgttcaaaatatcgataatgaattgatgaaattatacaatgatatcaacagtttggaagagaaaataagccatcaatttgacgatttcaaggaatatggttactcactgttttcggtttttattcatcgcggcgaggccagttatggtcactattggatatatatcaaggacagaaatcgcaatggaatttggaggaagtacaatgatgaaaccatcagtgaggtccaggaagaggaggtcttcaatttcaatgagggtaacactgcaactccatatttcctagtatatgtcaaacaaggacaagaaggtgatattgagccattgaaaagaattctaaagtag

SEQ ID NO: 10374 - DNA, 3819 bp, Artificial Sequence
  Description of Artificial Sequence: Synthetic polynucleotide
atgccgaacgaagataatgaacttcaaaaagcaattgagaaccatcataatcaattattaaaccaggataaagaaaatgctgacagaaatgggtctgttatagaagacctcccattatacgggacaagtataaaccagcagtctacccctggagatgttgacgatggaaaacacttattatatccagatattgccaccaacttaccattgaagacttctgacagacttttggacgatatactttgcgatactatttttctcaattctacagacccgaaggtcatgcaaaagggcttacaatccaggggtattttaaaagagtctatgctttcttactccactttcagaagtagtattcgccctaactgcttgggttctttaactgatcaagtggtttttcaaacaaaatccgagtatgattccatttcttgcccaaaatataataaaatacatgtatttcaggcggtcatctttaatccatctttggcagaacagcaaatttctacttttgatgatattgttaaaattcctatttatcatcttaaggttagcgtaaaagtccgccaagaattagagagattgaagaagcatgtcggtgttactcaattccactctttagatcatttgcacgaatacgatagagtagacctttctacttttgattcttccgatcctaatttgttggattacggtatttacgtttctgatgatactaacaaattaatcttgattgaaatttttaaacccgagtttaattctcctgaagagcatgagagttttactgccgacgcaattaagaagagatacaatgctatgtgtgtaaaaaatgaatctttagataaaagcgagacgccatctcaagttgactgtttttacacactttttaaaatttttaaagggcctttgacgaggaaaagtaaagcggaacctacaaagacaattgattctggaaatttggcccttaacactcacttgaatcctgaatggttaacgtccaagtatggatttcaagcaagctctgaaatcgatgaggaaactaatgagatatttactgaatacgtccctccagatatggtggactatgtaaacgatttggagacaagaaaaattagagaaagttttgtgaggaagtgtttacaattgatattttggggtcaattatctaccagtttattggcacctaattctcccttgaaaaatacgaaaagcgtaaagggaatgtcttctttacaaacttctttcagtacattgccttggttccatttattgggagaatccagagcaaggattttattaaattccaatgagcaaactcattctcctttggacgcagaacctcattttattaatctttccgtttctcattattataccgatagagatataatcagaaactacgaatctttgtcttctttggatcctgaaaatattgggttatattttgacgcattaacatacattgcaaataggaagggggcatatcaattgattgcttactgtggaaaacaggacattataggccaagaagctttggaaaatgctttgttaatgtttaaaattaaccctaaagagtgtaacatctccgaattaaatgaggcgactttgttatctatttacaaatatgaaacaagtaataagagccaagtaacctctaatcacttgacaaatttgaaaaatgctttgagattgttggccaaatataccaaatctgacaaattgaaattttacgtcgatcatgagccctacagagctttatcccaggcatacgacacactttctattgacgagtctgttgatgaagacattataaaaactgcatattctgtcaagattaacgactctcccggattaaagttggattgtgatagagcactttacaccattgctatcagtaaaagaagccttgatttgttcaattttttaacagaggaatgcccacagttttccaactattatggtccagagaagcttgattaccaagaggcattgaagcttcttcaagtgaatgaaaatgcctctgacgaaaccattttgaaaatctttaaacaaaagtggtttgatgaaaacgtttatgagcctgaccaatttcttattttgagggcagcattgaccaaaatcagtatagaaagaaattctactttaatcaccaacttcttattaactggtacgatagatccaaattccttgccgccagaaaattggccaactggcattaataatatcgggaacacctgttacttgaattctttattacaatattacttttccattgcgccattgagaagatatgtattggaatatcaaaaaacggtagaaaatttcaatgaccacctctctaatagtgggcatattagaagaattggtggaagagaaattagtagaggcgaagtggaaagatctattcaattcatataccaacttcgcaaccttttctatgcgatggttcatacaagagaaagatgtgtaacaccctctaaagagttggcatatttggcatttgctccaagtaatgttgaagtagaatttgaagtggaaggcaataaagtagttgatcaaacaggagttctttctgattctaagaaggaaacaacggatgacgcatttactacaaaaataaaggatacaagcttaattgatttagaaatggaagatggccttaatggcgatgttggtacagatgcgaacagaaaaaaaaatgaaagtaatgatgctgaagtaagtgagaacgaagatacaacaggattaacttctcctacgcgtgtggcaaaaatcagttctgatcaattagaaaatgctttggaaatgggtaggcaacaagatgttactgaatgcataggaaacgtgttatttcagatagaaagcggttctgagcctatcagatatgatgaagacaacgagcaatatgacttggttaagcaattattttatggtactactaaacaaagtattgttcctttgtccgcaacaaataaagtccgtacgaaagttgaaagattcttgtctttattgataaatattggcgatcatcctaaagatatttatgatgcgtttgattcttattttaaagacgaatatttgacaatggaagagtatggtgatgttatacgtaccgttgctgttacaacttttcctactattttgcaggtacaaatccaaagagtttattacgatcgtgaaagattaatgccgtttaaatccattgagcccttaccattcaaagaagttatttacatggacagatacgcggatacagagaaccctttattgttggcaaaaaagaaagaaacagaagaaatgaagcaaaagttgaaggtaatgaaaaatagacaaagagagcttttgagtcgtgatgattctgggcttacaaggaaggatgcatttttggagagtatcaagttgttggaaagtgataccataaagaaaactcctttaaaaattgaggctgctaatgatgtgataaagacgttgagaaacaacgttcaaaatatcgataatgaattgatgaaattatacaatgatatcaacagtttggaagagaaaataagccatcaatttgacgatttcaaggaatatggttactctttattttctgtttttattcatcgcggcgaggccagttatggtcactattggatatatatcaaggacagaaatcgcaatggaatttggaggaagtacaatgatgaaaccatcagtgaggtccaggaagaggaggtcttcaatttcaatgagggtaacactgcaactccatatttcttagtatatgtcaaacaaggacaagaaggtgatattgagccattgaaaagaattttgaagtga

SEQ ID NO: 10375 - DNA, 702 bp, Saccharomyces cerevisiae
atgttatcccgtgtttcagttttcaaacctgccagcagaggcttttccgtcttatcatctttaaagataacagaacatacatcagcaaaacacaccgaaaaacctgagcatgctcccaagtgtcagaatttatcagatgctcaggctgcatttttggaccgtgttattcgtgtagatcaagctggcgaattaggtgcagactacatctacgctggccagtacttcgtgttggctcataggtaccctcacttgaaacctgtgctaaagcacatatgggaccaggagatacatcatcataatacttttaacaatttgcaattgaaaaggagagtcaggccttccttattaacgcctttgtggaaggcaggagcctttgcaatgggggctggtaccgcattgatttctccagaagcagctatggcttgtactgaagctgtcgagacagtaatcggagggcactacaatggccaattgcgaaacttggccaatcaattcaatttagaaagaacagatggaacaaagggtccaagtgaggaaatcaaatccttaacttctactatccaacagttcagggatgacgagctagagcatctagacaccgctatcaagcatgattcgtatatggcagttccatatacagttatcactgaaggtattaaaacgatttgcagagtagctatatggagtgccgaaagaatttaa

SEQ ID NO: 10376 - DNA, 702 bp, Artificial Sequence
  Description of Artificial Sequence: Synthetic polynucleotide
atgttatcccgtgtttctgttttcaaacctgccagcagaggcttttccgtcttatcttctttaaagataacagaacatacaagtgcaaaacacaccgaaaaacctgagcatgctcccaagtgtcagaatttaagtgatgctcaggctgcatttttggaccgtgttattcgtgtagatcaagctggcgaattaggtgcagactacatctacgctggccagtacttcgtgttggctcataggtaccctcacttgaaacctgtgttgaagcacatatgggaccaggagatacatcatcataatacttttaacaatttgcaattgaaaaggagagtcaggccttccttattaacgcctttgtggaaggcaggagcctttgcaatgggggctggtaccgcattgatttctccagaagcagctatggcttgtactgaagctgtcgagacagtaatcggagggcactacaatggccaattgagaaacttggccaatcaattcaatttagaaagaacagatggaacaaagggtccaagtgaggaaatcaaatccttaacttctactatccaacagttcagggatgacgagttagagcatttggacaccgctatcaagcatgattcttatatggcagttccatatacagttatcactgaaggtattaaaacgatttgcagagtagctatatggagtgccgaaagaatttga

SEQ ID NO: 10377 - DNA, 717 bp, Saccharomyces cerevisiae
atggattacgagaagtttctgttatttggggattccattactgaatttgcttttaatactaggcccattgaagatggcaaagatcagtatgctcttggagccgcattagtcaacgaatatacgagaaaaatggatattcttcaaagagggttcaaagggtacacttctagatgggcgttgaaaatacttcctgagattttaaagcatgaatccaatattgtcatggccacaatatttttgggtgccaacgatgcatgctcagcaggtccccaaagtgtccccctccccgaatttatcgataatattcgtcaaatggtatctttgatgaagtcttaccatatccgtcctattataataggaccggggctagtagatagagagaagtgggaaaaagaaaaatctgaagaaatagctctcggatacttccgtaccaacgagaactttgccatttattccgatgccttagcaaaactagccaatgaggaaaaagttcccttcgtggctttgaataaggcgtttcaacaggaaggtggtgatgcttggcaacaactgctaacagatggactgcacttttccggaaaagggtacaaaatttttcatgacgaattattgaaggtcattgagacattctacccccaatatcatcccaaaaacatgcagtacaaactgaaagattggagagatgtgctagatgatggatctaacataatgtcttga

SEQ ID NO: 10378 - DNA, 717 bp, Artificial Sequence
  Description of Artificial Sequence: Synthetic polynucleotide
atggattacgagaagtttttattatttggggattccattactgaatttgcttttaatactaggcccattgaagatggcaaagatcagtatgctcttggagccgcattagtcaacgaatatacgagaaaaatggatattcttcaaagagggttcaaagggtacacttctagatgggcgttgaaaatacttcctgagattttaaagcatgaatccaatattgtcatggccacaatatttttgggtgccaacgatgcatgctctgcaggtccccaaagtgtccccctccccgaatttatcgataatattcgtcaaatggtatctttgatgaagtcttaccatatccgtcctattataataggaccggggttggtagatagagagaagtgggaaaaagaaaaatctgaagaaatagctctcggatacttccgtaccaacgagaactttgccatttattccgatgccttagcaaaattggccaatgaggaaaaagttcccttcgtggctttgaataaggcgtttcaacaggaaggtggtgatgcttggcaacaattattaacagatggattgcacttttccggaaaagggtacaaaatttttcatgacgaattattgaaggtcattgagacattctacccccaatatcatcccaaaaacatgcagtacaaattgaaagattggagagatgtgttggatgatggatctaacataatgtcttga

SEQ ID NO: 10379 - DNA, 3024 bp, Saccharomyces cerevisiae
atggcatcaactgctcccaatgaacaatttccatcctgcgtacgatgcaaagaatttattaccacggggcatgcatatgagttgggttgtgatagatggcacacacattgtttcgcttgttacaaatgtgagaaaccattaagctgcgaatctgattttttagtccttggaacaggtgctttgatctgctttgattgttccgattcttgtaaaaattgcggtaaaaagattgatgatttggccataatactgtcctcttcaaatgaggcctattgttcagattgttttaaatgctgtaaatgtggtgaaaatattgctgacctacggtacgcgaaaaccaagcgaggtttattctgtttaagctgtcacgaaaagctattagccaaacgaaaatactacgaagagaagaaaaggcgactcaaaaagaatttaccaagtttacccacacctgtgattgataatggccatactgatgaggtctcagcttctgcagtcctcccagaaaaaacatttagcagacctgcatcactagttaatgagattccttcaggttctgaaccttccaaggacatagaaaccaattcgagtgatattgttccgcattttatcactgggtataacgatagcgatgacaactctggaagttcaaaattcggttcaaatgtgtccatagatgttataggaccggaagaaaatagcacggagcatgtaaatgatgatgttaaagaggaagcagaagcaccttcagcgaatatgtcactcaatgttgctacggatccaaccctaagttgtaaagaacctcctagccattcgaggaatttgttaaataaaacaccgttgagaaattcttcgggtcagtatctcgcaaaatctccaagctcctatagacagggaataattgttaacgatagtctggaagagagcgatcaaattgatcctccaaataacagttcacgaaatgcaagtgaattgttgacctcggtattgcatagcccagtttctgttaatatgaaaaatccgaagggttcaaatacggatattttcaacaccggtgaaatatcccaaatggatccttcgctatcaaggaaagtattgaataatattgtcgaagaaacaaacgcacttcaaaggccagttgttgaagttgtcaaggaagacagaagtgttcctgacctagcaggtgttcagcaagagcaagcagagaaatattcctattcaaacaatagtggaaaaggcagaaaaatttcaagatcattgtcacgaaggtccaaagatttgatgattaatctaaaatccagagccacaggcaaacaggatagtaacgttaaactttcacctgcttctaaagtgacatctagacgctcacaagatttaatgagggataatgattcacataccggccttgacacaccaaattctaacagcacttctttagatattttggtgaataatcaaaaaagcctaaactataaaagatttaccgataatggcactcttagggtgactagtggaaaggaaaccgcccttgaagaacagaagaatcacagttttaaatctccgtcaccaattgatcatttgttacaatcgccagctacaccaagtaatgtatccatgtatcgaactccgcctttagatagctcattgacatttgataggcggaatgggtcttcatacagtaaccaaaattatagcatacctagttggcagaaaactccaaagacccaattggagaatagcgacaattttgaggaacagaaggaaacactttacgaaaatagcgaatctagaaacgatccctcgcttgataaagaaattgtcacggcagagcactatctgaagcaattaaaaataaatttgaaagaacttgaatctcaaagggaagaattaatgaaagagatcactgaaatgaagtctatgaaagaggctctacgccgacatattgaatcctataatagcgagaaaaataaactatatcttgactccaatgaattatcaaataatccaccgatgataaatgaaatcagcttaggtgagtcgccacccgtgaaacatgttgcaactgcaagttctgtagcgcgaagttctgttaaaccaaaattttggaagtttttttcatctgcaaagccacagaccgagcaatctatacaaggtgtcagtacaaataatacaaattccatcgttaaaagtgccccagttttgctttctgctccctcatctggtagtaattccggccgtttagaaatttcaccacctgtgctacaaaatcctaatgaatttagtgacgttagattagtacctatcgagaacgatgcaaatatgggacaaagtaaagatggagaagaatatttggatggaagcaatttgtatggttcaagtctcgttgctaggtgcaattatgaaaacaatgaaataccgatgatactatctgtctgcatagattttattgaatcagacgaagaaaatatgagatcggagggcatttatagaaaatcaggttcccagctagtcatagaagaaatagaaaagcaattttctgcatggaaagtacaacaaaataccgaaacgccaaatattttaacggaacaagatctcaacgttgttactggtgtgttgaagcgatacttaagaaagctccccaaccctatctttacctttcaaatatacgagccgttgatgaggttagttaaatctaaaaaaatgatggaaaacttgccatttgttggaggaaagttgtccttagaagcaaagaattcggacacttatatgtcgagcaagagcgctttaaaaaacatattggaagaccttccaagggaacattatagggtgttaagagtactgagtgaacatatagaaaaggttacacggtacagtcactggaatcgaatgacgctttataatttggctttagtttttgctccaggtttgattcgtgatttcagtggagaaaaggatattattgatatgaaagaaagaaactatattgtcgcatttatatttgggaactacaaagatatcctgacgtag

SEQ ID NO: 10380 - DNA, 3024 bp, Artificial Sequence
  Description of Artificial Sequence: Synthetic polynucleotide
atggcatctactgctcccaatgaacaatttccatcctgcgtaagatgcaaagaatttattaccacggggcatgcatatgagttgggttgtgatagatggcacacacattgtttcgcttgttacaaatgtgagaaaccattaagctgcgaatctgattttttagtccttggaacaggtgctttgatctgctttgattgttccgattcttgtaaaaattgcggtaaaaagattgatgatttggccataatattatcctcttccaatgaggcctattgttctgattgttttaaatgctgtaaatgtggtgaaaatattgctgacttgagatacgcgaaaaccaagagaggtttattctgtttaagctgtcacgaaaagcttttagccaaaagaaaatactacgaagagaagaaaaggaggctcaaaaagaatttaccaagtttacccacacctgtgattgataatggccatactgatgaggtctctgcttctgcagtcctcccagaaaaaacatttagcagacctgcatctttggttaatgagattccttctggttctgaaccttccaaggacatagaaaccaatagtagtgatattgttccgcattttatcactgggtataacgatagcgatgacaactctggaagttctaaattcggtagtaatgtgtccatagatgttataggaccggaagaaaatagcacggagcatgtaaatgatgatgttaaagaggaagcagaagcaccttctgcgaatatgagtctcaatgttgctacggatccaaccttaagttgtaaagaacctcctagccattccaggaatttgttaaataaaacaccgttgagaaattcttctggtcagtatctcgcaaaatctccaagctcctatagacagggaataattgttaacgatagtttagaagagagcgatcaaattgatcctccaaataacagttctagaaatgcaagtgaattgttgacctctgtattgcatagcccagtttctgttaatatgaaaaatccgaagggtagtaatacggatattttcaacaccggtgaaatatcccaaatggatccttctttatctaggaaagtattgaataatattgtcgaagaaacaaacgcacttcaaaggccagttgttgaagttgtcaaggaagacagaagtgttcctgacttggcaggtgttcagcaagagcaagcagagaaatattcctattccaacaatagtggaaaaggcagaaaaatttctagaagtttgagcagaaggtccaaagatttgatgattaatttgaaatccagagccacaggcaaacaggatagtaacgttaaactttctcctgcttctaaagtgacatctagacgctctcaagatttaatgagggataatgattctcataccggccttgacacaccaaattctaacagcacttctttagatattttggtgaataatcaaaaaagcttgaactataaaagatttaccgataatggcactcttagggtgactagtggaaaggaaaccgcccttgaagaacagaagaatcacagttttaaatctccgtctccaattgatcatttgttacaatctccagctacaccaagtaatgtatccatgtatagaactccgcctttagatagctctttgacatttgataggagaaatgggtcttcctacagtaaccaaaattatagcatacctagttggcagaaaactccaaagacccaattggagaatagcgacaattttgaggaacagaaggaaacactttacgaaaatagcgaatctagaaacgatccctcccttgataaagaaattgtcacggcagagcactatttgaagcaattaaaaataaatttgaaagaacttgaatctcaaagggaagaattaatgaaagagatcactgaaatgaagtctatgaaagaggctttacgccgccatattgaatcctataatagcgagaaaaataaactttatcttgactccaatgaattatccaataatccaccgatgataaatgaaatcagcttaggtgagtctccacccgtgaaacatgttgcaactgcaagttctgtagcgagaagttctgttaaaccaaaattttggaagtttttttcttctgcaaagccacagaccgagcaatctatacaaggtgtcagtacaaataatacaaattccatcgttaaaagtgccccagttttgctttctgctccctcttctggtagtaattccggccgtttagaaatttctccacctgtgttgcaaaatcctaatgaatttagtgacgttagattagtacctatcgagaacgatgcaaatatgggacaaagtaaagatggagaagaatatttggatggaagcaatttgtatggtagtagtctcgttgctaggtgcaattatgaaaacaatgaaataccgatgatattatctgtctgcatagattttattgaaagtgacgaagaaaatatgagaagtgagggcatttatagaaaatctggttcccagttggtcatagaagaaatagaaaagcaattttctgcatggaaagtacaacaaaataccgaaacgccaaatattttaacggaacaagatctcaacgttgttactggtgtgttgaagagatacttaagaaagctccccaaccctatctttacctttcaaatatacgagccgttgatgaggttagttaaatctaaaaaaatgatggaaaacttgccatttgttggaggaaagttgtccttagaagcaaagaatagtgacacttatatgtctagcaagagcgctttaaaaaacatattggaagaccttccaagggaacattatagggtgttaagagtattgagtgaacatatagaaaaggttacaagatacagtcactggaatagaatgacgctttataatttggctttagtttttgctccaggtttgattcgtgatttcagtggagaaaaggatattattgatatgaaagaaagaaactatattgtcgcatttatatttgggaactacaaagatatcttaacgtga

SEQ ID NO: 10381 - DNA, 1716 bp, Saccharomyces cerevisiae
atggattctagaacagttggtatattaggagggggacaattgggacgtatgattgttgaggcagcaaacaggctcaacattaagacggtaatactagatgctgaaaattctcctgccaaacaaataagcaactccaatgaccacgttaatggctccttttccaatcctcttgatatcgaaaaactagctgaaaaatgtgatgtgctaacgattgagattgagcatgttgatgttcctacactaaagaatcttcaagtaaaacatcccaaattaaaaatttacccttctccagaaacaatcagattgatacaagacaaatatattcaaaaagagcatttaatcaaaaatggtatagcagttacccaaagtgttcctgtggaacaagccagtgagacgtccctattgaatgttggaagagatttgggttttccattcgtcttgaagtcgaggactttggcatacgatggaagaggtaacttcgttgtaaagaataaggaaatgattccggaagctttggaagtactgaaggatcgtcctttgtacgccgaaaaatgggcaccatttactaaagaattagcagtcatgattgtgagatctgttaacggtttagtgttttcttacccaattgtagagactatccacaaggacaatatttgtgacttatgttatgcgcctgctagagttccggactccgttcaacttaaggcgaagttgttggcagaaaatgcaatcaaatcttttcccggttgtggtatatttggtgtggaaatgttctatttagaaacaggggaattgcttattaacgaaattgccccaaggcctcacaactctggacattataccattgatgcttgcgtcacttctcaatttgaagctcatttgagatcaatattggatttgccaatgccaaagaatttcacatctttctccaccattacaacgaacgccattatgctaaatgttcttggagacaaacatacaaaagataaagagctagaaacttgcgaaagagcattggcgactccaggttcctcagtgtacttatatggaaaagagtctagacctaacagaaaagtaggtcacataaatattattgcctccagtatggcggaatgtgaacaaaggctgaactacattacaggtagaactgatattccaatcaaaatctctgtcgctcaaaagttggacttggaagcaatggtcaaaccattggttggaatcatcatgggatcagactctgacttgccggtaatgtctgccgcatgtgcggttttaaaagattttggcgttccatttgaagtgacaatagtctctgctcatagaactccacataggatgtcagcatatgctatttccgcaagcaagcgtggaattaaaacaattatcgctggagctggtggggctgctcacttgccaggtatggtggctgcaatgacaccacttcctgtcatcggtgtgcccgtaaaaggttcttgtctagatggagtagattctttacattcaattgtgcaaatgcctagaggtgttccagtagctaccgtcgctattaataatagtacgaacgctgcgctgttggctgtcagactgcttggcgcttatgattcaagttatacaacgaaaatggaacagtttttattaaagcaagaagaagaagttcttgtcaaagcacaaaagttagaaactgtcggttacgaagcttatctagaaaacaagtaa

SEQ ID NO: 10382 - DNA, 1716 bp, Artificial Sequence
  Description of Artificial Sequence: Synthetic polynucleotide
atggattctagaacagttggtatattaggagggggacaattgggacgtatgattgttgaggcagcaaacaggctcaacattaagacggtaatattggatgctgaaaattctcctgccaaacaaataagcaactccaatgaccacgttaatggctccttttccaatcctcttgatatcgaaaaattggctgaaaaatgtgatgtgttaacgattgagattgagcatgttgatgttcctacattgaagaatcttcaagtaaaacatcccaaattaaaaatttacccttctccagaaacaatcagattgatacaagacaaatatattcaaaaagagcatttaatcaaaaatggtatagcagttacccaaagtgttcctgtggaacaagccagtgagacgtccttattgaatgttggaagagatttgggttttccattcgtcttgaagtccaggactttggcatacgatggaagaggtaacttcgttgtaaagaataaggaaatgattccggaagctttggaagtattgaaggatcgtcctttgtacgccgaaaaatgggcaccatttactaaagaattagcagtcatgattgtgagatctgttaacggtttagtgttttcttacccaattgtagagactatccacaaggacaatatttgtgacttatgttatgcgcctgctagagttccggactccgttcaacttaaggcgaagttgttggcagaaaatgcaatcaaatcttttcccggttgtggtatatttggtgtggaaatgttctatttagaaacaggggaattgcttattaacgaaattgccccaaggcctcacaactctggacattataccattgatgcttgcgtcacttctcaatttgaagctcatttgagaagtatattggatttgccaatgccaaagaatttcacatctttctccaccattacaacgaacgccattatgttgaatgttcttggagacaaacatacaaaagataaagagttagaaacttgcgaaagagcattggcgactccaggttcctctgtgtacttatatggaaaagagtctagacctaacagaaaagtaggtcacataaatattattgcctccagtatggcggaatgtgaacaaaggttaaactacattacaggtagaactgatattccaatcaaaatctctgtcgctcaaaagttggacttggaagcaatggtcaaaccattggttggaatcatcatgggatctgactctgacttgccggtaatgtctgccgcatgtgcggttttaaaagattttggcgttccatttgaagtgacaatagtctctgctcatagaactccacataggatgtctgcatatgctatttccgcaagcaagcgtggaattaaaacaattatcgctggagctggtggggctgctcacttgccaggtatggtggctgcaatgacaccacttcctgtcatcggtgtgcccgtaaaaggttcttgtttggatggagtagattctttacattctattgtgcaaatgcctagaggtgttccagtagctaccgtcgctattaataatagtacgaacgctgcgttattggctgtcagattacttggcgcttatgattctagttatacaacgaaaatggaacagtttttattaaagcaagaagaagaagttcttgtcaaagcacaaaagttagaaactgtcggttacgaagcttatttggaaaacaagtga

SEQ ID NO: 10383 - DNA, 2682 bp, Saccharomyces cerevisiae
atgttgcgaagagaactaaataactctatcagcaacaggtcgatagaaaatgaatcctttccttttgaaaggccgaatgtcagctatataatatccgcagaatttgataataaattaggtcctattttgaagcaccaatacccgaaagatattccaggtttcaatcagttctcacatgagcaacgcaacggcaatacgtcggtgtctatgaacttggcaagtttaatgataccgagtagcatagagagaaatcccggcaaacaagatattacagtgtttaccctttattacaataagtttactcaaaactatcaactctttcctgtgccaaaagaccctcgtttcagtttcaatctgcatcatcgtgaacagtcagatggtagtgttaccaatagcatatattacgatgccgaaaatcatcaagatgcaaaaaataatagatacactattgtcttggaagatgatgagctcgaatgccaggaagttcagaataatcagaaagccatcgacaacgaacctttatttttcataaatgtcgccaacacagtattagacaccacgaacgatagaggggcagtaatcaagtcgattgccatcggaacaccattaaaaaccttctttgcattcaaaaatattattgtattagtgttagacttgtatatgaaagctcccactcaagctgctgctacagacatactgcttgattgctttaatatgctaaacagtattgaccttacattgattaatgacatacattccaaaagtagtatacaagaagtgctacactctatccatgacgaatctatcattaccaaagtatttttagacccggattccactttaaagaaactcttttgcatcaatggatttgacactaaggacaagtatggtaacattgtgacttttcatgaccaactcattcaatatcattttacaagatttcagccaaagacgctcccgccatttttgttaaaaatcccattgcaatttaatatgattagaagagagcctatttatattgaaaatgattataatgaactagttttaaaatttttggataaatttgtcccttaccttcttaaagccggacaaaaagttaatgcatggaagttagtcatcaattcaactaaactgagtaaagaagacctatgcgcttttattttgtcattagccaacataacggcaacttatgctagcgatccacaatcatacttcaaaggaaatgctgcgttgatttttccctatatggacatttctcttgttgacggtttgcgggcgtatgtagcatcgaatagtgattttgtcggatgctttgcaattatcggaactgccaatccaattttccgataccagttagatatctgggattattactacgatgtggatgagggagtgttttatgaaaataatagtccagaaaaagaaaagccagatacagtggcagaagtgaagattgggcctaaccctttgagaaagatattcaataggcctcatttctcaaccaacgcagtcaacgaaagtcaggtaaacttgggccagaagctcttttctcttcttatcgacgaatatcatgatagtgatactatcatgagcgttttgagaaggctgaatgttcttcagttggaaaaccttctggacgctttgaaaagacgagaaattccacctaatatagcactaaaagatgaatatatcatgttttataaagattttttcattttcccggagttctttgattattttacactgcatagtattgaactattgtctaacttggataattgtttatttagcttaggaaacacatgccagttattttccacagagcaaatatattcccaattaagccaaatattggacattgttaaagagctgtttcgcatggtatcggtaagcaggacaaacattgagaagtttttaaacgcttgtttgaactattctccgttcaaaatattacccacagctcagttacacggtgataatatttctaggtggagttttgaaagcgaagtgcgtcagggtttcgataattttaacagctatatgggcatcgaaaaagatccccacggtgttatagtatcagcaatagatctttttactcaaatttacagttttgatatcttggcgtttttcctcacatttattacaaaagaaagtgggcaggatttgcccttcacaaaatctctgtccaggagaagaacgtatttgaccagaattgctcaatcttcttcattgagacagtttttacaactgagtacacgccctaatataaggattctgggaggtaatgggcagggtactggaaattccaattatcccgaatttacaaacgcatcctcagtcatctcacccaagctaagggcttctcctctactagaaagaagggcgtcaaaaatctgctatgctattacgaaattactctataggttagaatgtcatcccataggtatggcccttttaaagaagtatctccacaatcaattgcgagaagcctatctagaatcaaaacgacactttatttccaaaaagggagattcgaccaacacttcctctaccattgcatcatcatctttcgctggcgcatctgttcctctatcttcaaacgaatcaggaatgctaaacggcttgaagcaaattaacgaacaacaagaatctacattagaaaccactcaaaaggaagactag

SEQ ID NO: 10384 - DNA, 2682 bp, Artificial Sequence
  Description of Artificial Sequence: Synthetic polynucleotide
atgttgagaagagaattgaataactctatcagcaacaggtctatagaaaatgaatcctttccttttgaaaggccgaatgtcagctatataatatccgcagaatttgataataaattaggtcctattttgaagcaccaatacccgaaagatattccaggtttcaatcagttctctcatgagcaacgcaacggcaatacgtctgtgtctatgaacttggcaagtttaatgataccgagtagcatagagagaaatcccggcaaacaagatattacagtgtttaccctttattacaataagtttactcaaaactatcaactctttcctgtgccaaaagaccctcgtttcagtttcaatttacatcatcgtgaacagagcgatggtagtgttaccaatagcatatattacgatgccgaaaatcatcaagatgcaaaaaataatagatacactattgtcttggaagatgatgagctcgaatgccaggaagttcagaataatcagaaagccatcgacaacgaacctttatttttcataaatgtcgccaacacagtattagacaccacgaacgatagaggggcagtaatcaagtctattgccatcggaacaccattaaaaaccttctttgcattcaaaaatattattgtattagtgttagacttgtatatgaaagctcccactcaagctgctgctacagacatattacttgattgctttaatatgttgaacagtattgaccttacattgattaatgacatacattccaaaagtagtatacaagaagtgttacactctatccatgacgaatctatcattaccaaagtatttttagacccggattccactttaaagaaactcttttgcatcaatggatttgacactaaggacaagtatggtaacattgtgacttttcatgaccaactcattcaatatcattttacaagatttcagccaaagacgctcccgccatttttgttaaaaatcccattgcaatttaatatgattagaagagagcctatttatattgaaaatgattataatgaattggttttaaaatttttggataaatttgtcccttaccttcttaaagccggacaaaaagttaatgcatggaagttagtcatcaattctactaaattaagtaaagaagacctttgcgcttttattttgtctttagccaacataacggcaacttatgctagcgatccacaatcttacttcaaaggaaatgctgcgttgatttttccctatatggacatttctcttgttgacggtttgagggcgtatgtagcatctaatagtgattttgtcggatgctttgcaattatcggaactgccaatccaattttcaggtaccagttagatatctgggattattactacgatgtggatgagggagtgttttatgaaaataatagtccagaaaaagaaaagccagatacagtggcagaagtgaagattgggcctaaccctttgagaaagatattcaataggcctcatttctccaccaacgcagtcaacgaaagtcaggtaaacttgggccagaagctcttttctcttcttatcgacgaatatcatgatagtgatactatcatgagcgttttgagaaggttgaatgttcttcagttggaaaaccttttggacgctttgaaaagaagagaaattccacctaatatagcattgaaagatgaatatatcatgttttataaagattttttcattttcccggagttctttgattattttacattgcatagtattgaattattgtctaacttggataattgtttatttagcttaggaaacacatgccagttattttccacagagcaaatatattcccaattaagccaaatattggacattgttaaagagttatttcgcatggtatctgtaagcaggacaaacattgagaagtttttaaacgcttgtttgaactattctccgttcaaaatattacccacagctcagttacacggtgataatatttctaggtggagttttgaaagcgaagtgcgtcagggtttcgataattttaacagctatatgggcatcgaaaaagatccccacggtgttatagtatctgcaatagatctttttactcaaatttacagttttgatatcttggcgtttttcctcacatttattacaaaagaaagtgggcaggatttgcccttcacaaaatctttatccaggagaagaacgtatttgaccagaattgctcaatcttcttctttgagacagtttttacaattgagtacacgccctaatataaggattttaggaggtaatgggcagggtactggaaattccaattatcccgaatttacaaacgcatcctctgtcatctcccccaagttaagggcttctcctttattggaaagaagggcgtccaaaatctgctatgctattacgaaattactctataggttagaatgtcatcccataggtatggcccttttaaagaagtatctccacaatcaattgagagaagcctatttggaaagtaaaagacactttatttccaaaaagggagattctaccaacacttcctctaccattgcatcttcttctttcgctggcgcatctgttcctttatcttccaacgaatctggaatgttgaacggcttgaagcaaattaacgaacaacaagaatctacattagaaaccactcaaaaggaagactga

SEQ ID NO: 10385 - DNA, 879 bp, Saccharomyces cerevisiae
atggaggacagtaaaaagaaaggattaatagaaggcgctatactcgatataataaacggttccattgcaggcgcctgtggtaaggtgatcgagtttcctttcgatactgtgaaagtcaggttgcaaacacaagcatccaacgtgttcccaacaacatggtcttgtataaaatttacttaccaaaatgaaggaatagcacgagggttttttcaaggcattgcttcacctttagttggagcatgtctggagaacgcgacattatttgtgtcttataaccaatgttctaaatttttagaaaaacatacaaacgtttccccgttggggcaaatcctgatctctggtggagtagcgggttcatgtgctagtttagttttgacacccgtggagctggtgaagtgtaagttgcaggttgcgaacttacaagttgcatcagctaaaacgaaacatacaaaggtgttgcctacaataaaagcaattataactgagagaggattggcaggattgtggcaagggcaatcgggcacttttattcgagaaagcttcggtggtgttgcctggtttgcaacctacgaaatagttaagaagtcgttgaaagataggcactcccttgatgacccaaaaagagatgaaagtaagatatgggaactacttattagtggagggagcgctggattggcattcaacgccagtatttttcctgcggatactgtgaaatcagtaatgcaaactgaacatataagcctcaccaatgcggtgaagaagatatttggcaaatttggactaaagggtttttatcgaggactgggtataaccctttttagggcagtaccagcaaacgctgcagttttttacatctttgagactctttctgcactttaa

SEQ ID NO: 10386 - DNA, 879 bp, Artificial Sequence
  Description of Artificial Sequence: Synthetic polynucleotide
atggaggacagtaaaaagaaaggattaatagaaggcgctatactcgatataataaacggttccattgcaggcgcctgtggtaaggtgatcgagtttcctttcgatactgtgaaagtcaggttgcaaacacaagcatccaacgtgttcccaacaacatggtcttgtataaaatttacttaccaaaatgaaggaatagcaagagggttttttcaaggcattgcttcccctttagttggagcatgtttagagaacgcgacattatttgtgtcttataaccaatgttctaaatttttagaaaaacatacaaacgtttccccgttggggcaaatcttaatctctggtggagtagcgggttcttgtgctagtttagttttgacacccgtggagttggtgaagtgtaagttgcaggttgcgaacttacaagttgcatctgctaaaacgaaacatacaaaggtgttgcctacaataaaagcaattataactgagagaggattggcaggattgtggcaagggcaaagtggcacttttattagagaaagcttcggtggtgttgcctggtttgcaacctacgaaatagttaagaagtctttgaaagataggcactcccttgatgacccaaaaagagatgaaagtaagatatgggaattgcttattagtggagggagcgctggattggcattcaacgccagtatttttcctgcggatactgtgaaatctgtaatgcaaactgaacatataagcctcaccaatgcggtgaagaagatatttggcaaatttggattgaagggtttttatagaggattaggtataaccctttttagggcagtaccagcaaacgctgcagttttttacatctttgagactctttctgcactttga

SEQ ID NO: 10387 - DNA, 657 bp, Saccharomyces cerevisiae
atgacaaagctacaaggactacagggattaaaacacatcaaagcggttgtatttgatatggatggcacattatgcctaccccagccttggatgtttccagcaatgagaaacgccataggattggaggacaaatcgattgatatccttcatttcattgatacattgcccacagaaaaagaaaaaaaagaagcgcatgatagaatagaattagttgaggcaaaagccatgaaggagatgcaaccgcagcctggtctggttgacataatgaggtatttgacgaaaaatggtattagcaagaacatatgtactagaaatgtcggagccccggtagagacttttgttaaaagatttattccatccgagctttcgaggtttgactatattgtgacaagggagtttaggcctacaaaaccgcaaccagacccattattacacatcgcctcgaagctaaatataaggcccttggaaatgatcatggtaggagattcatttgacgacatgaaatccggtagatctgctggatgtttcacggtattactcaagaatcatgtgaatggacatttactgctcgaacataaagaactagtagacgtttcagtagaggatctttccgaaataattgaattgattcaaaatatgaataaagaaagtttctaa

SEQ ID NO: 10388 - DNA, 657 bp, Artificial Sequence
  Description of Artificial Sequence: Synthetic polynucleotide
atgacaaagttacaaggattacagggattaaaacacatcaaagcggttgtatttgatatggatggcacattatgcttgccccagccttggatgtttccagcaatgagaaacgccataggattggaggacaaatccattgatatccttcatttcattgatacattgcccacagaaaaagaaaaaaaagaagcgcatgatagaatagaattagttgaggcaaaagccatgaaggagatgcaaccgcagcctggtttagttgacataatgaggtatttgacgaaaaatggtattagcaagaacatatgtactagaaatgtcggagccccggtagagacttttgttaaaagatttattccatccgagctttctaggtttgactatattgtgacaagggagtttaggcctacaaaaccgcaaccagacccattattacacatcgcctccaagttgaatataaggcccttggaaatgatcatggtaggagattcttttgacgacatgaaatccggtagatctgctggatgtttcacggtattactcaagaatcatgtgaatggacatttacttctcgaacataaagaattggtagacgtttctgtagaggatctttccgaaataattgaattgattcaaaatatgaataaagaaagtttctga

SEQ ID NO: 10389 - DNA, 1656 bp, Saccharomyces cerevisiae
atgacttcggctgtaccttatgatccatatgatgatctggataacaatccatttgctgagccccaggaggaagattctgaacctgctgcaacaaccacagatggatcatcttctatgtcagaggagcgtgtaggtactgagcaaactgcagcttccgttcaggacaacggaactgcaaataacattcaaaatggtcttggtgaagaaggaaacgcaacacgatcaaaaacttcaaacgaacacaatgaaaaccaacaaccatctcaaccatcagaacgtgttatacttcctgaaagaagtgatgagaaaaaaaaatacactctacttgcaaaagtaacaggattggaacgatttggatctgcaaccggtaagaaagagaatccgactattatatttgattgctccacaaatttgccaacatttcgcaaacaacaatacaagaatgtcaaaaaatcatacgaagaattccaccaattgttcaaatatctgaatgttgccattcaggaatcttttgttcctactcttccctctgcgtatactacattcggaattaatagcgaagaagataggatgaaagtaacgcgaaatttccaactttggtttaacaggctatcgcaagaccccttaattattcggaatgaagaagtggcctttttcattgaaagtgactttaatacgtacacacccatcaacaagtccaaatcactcgcatctgggttgaaaagaaaaacattgaaacaattagcacctccatatgatgaaatcacagaattagcagaattccggccattagtcaagtctatatatgttgtttctcagagcttgcaagaaaaactgctaagagtttccagaaatcgcaagatgatggttcaagaagaaaatgccttcggccaggatttcgttaatctagatgagcacaataaactttacagaagatacggtaaaatattgactgctgtgggtgatattgatagcattatagcaaccatggacatggcgacattgtacgatggtttagagtggattgtcagagatgcttatgccgtgaaggaagcattgaccaacaggcattttatcatgcgaaatctagtacaggcacagcagaattcaaaggcgaaacaggaacaagcacgcaggttccggtcaagaagagatattaaccctatgaaaatcgatgaagcactacgtcagttgaaagctgcagctaaaaacgaacaagttttgacccttaagcttcaacgaatcacgtccaacatgattatcgagagaaaacagtggattagctggtatgaagaatggataagaagctcgatcaaagaatttacactaagaaagatagagtatgaaagaaagaagctgacgttactagaacgagtacgttctgatatcagaaaagctgatgaaaacggaggtttgtcacgtctaggacgccatgctgtctcaaacaacaactccgatacttctcaaacccttaaaggggacagttggacgggagagagcaaccgcaaaagtcaaatccccatcaacaagatcgctcataccgaatttgatgatgaactattcactgaagacgatgggtacaactctcaggactcagacactacatcactgaatgcgcgccatgctgcttcacttttgggcatgtccactaaataa

SEQ ID NO: 10390 - DNA, 1656 bp, Artificial Sequence
  Description of Artificial Sequence: Synthetic polynucleotide
atgactagtgctgtaccttatgatccatatgatgatttggataacaatccatttgctgagccccaggaggaagattctgaacctgctgcaacaaccacagatggatcttcttctatgtctgaggagcgtgtaggtactgagcaaactgcagcttccgttcaggacaacggaactgcaaataacattcaaaatggtcttggtgaagaaggaaacgcaacaagaagtaaaacttctaacgaacacaatgaaaaccaacaaccatctcaaccatctgaacgtgttatacttcctgaaagaagtgatgagaaaaaaaaatacactttacttgcaaaagtaacaggattggaaagatttggatctgcaaccggtaagaaagagaatccgactattatatttgattgctccacaaatttgccaacatttcgcaaacaacaatacaagaatgtcaaaaaatcttacgaagaattccaccaattgttcaaatatttgaatgttgccattcaggaatcttttgttcctactcttccctctgcgtatactacattcggaattaatagcgaagaagataggatgaaagtaacgagaaatttccaactttggtttaacaggctttctcaagaccccttaattattagaaatgaagaagtggcctttttcattgaaagtgactttaatacgtacacacccatcaacaagtccaaatctctcgcatctgggttgaaaagaaaaacattgaaacaattagcacctccatatgatgaaatcacagaattagcagaattcagaccattagtcaagtctatatatgttgtttctcagagcttgcaagaaaaattattaagagtttccagaaatcgcaagatgatggttcaagaagaaaatgccttcggccaggatttcgttaatttggatgagcacaataaactttacagaagatacggtaaaatattgactgctgtgggtgatattgatagcattatagcaaccatggacatggcgacattgtacgatggtttagagtggattgtcagagatgcttatgccgtgaaggaagcattgaccaacaggcattttatcatgagaaatttggtacaggcacagcagaattctaaggcgaaacaggaacaagcacgcaggttcagatctagaagagatattaaccctatgaaaatcgatgaagcattgcgtcagttgaaagctgcagctaaaaacgaacaagttttgacccttaagcttcaaagaatcacgtccaacatgattatcgagagaaaacagtggattagctggtatgaagaatggataagaagctctatcaaagaatttacattaagaaagatagagtatgaaagaaagaagttgacgttattggaaagagtacgttctgatatcagaaaagctgatgaaaacggaggtttgtctcgtttaggacgccatgctgtctccaacaacaactccgatacttctcaaacccttaaaggggacagttggacgggagagagcaaccgcaaaagtcaaatccccatcaacaagatcgctcataccgaatttgatgatgaattattcactgaagacgatgggtacaactctcaggacagtgacactacatctttgaatgcgcgccatgctgcttctcttttgggcatgtccactaaatga

SEQ ID NO: 10391 - DNA, 2529 bp, Saccharomyces cerevisiae
atggttgctttcactgttgaccaaatgcgttctttaatggacaaagttaccaatgtgcgtaacatgtccgttattgctcacgtcgatcatggtaagtccactttgaccgattccttggtccaaagagccggtattatttccgctgctaaggctggtgaagctcgtttcaccgataccagaaaggatgaacaagaaagaggtatcactatcaagtctaccgctatttctctatactctgaaatgtctgacgaagatgtcaaggaaatcaagcaaaagaccgacggtaactccttcttgatcaacttgatcgactctccaggtcacgttgacttctcctctgaagttactgccgctttacgtgtcactgacggtgctttggttgtcgtcgacaccattgaaggtgtctgtgtccaaaccgaaactgttttgagacaagctttgggtgaaagaatcaagcctgttgttgttatcaacaaggtcgacagagctttgttggaattgcaagtttctaaggaagatttataccaaacctttgccagaactgttgaatccgttaacgtcatcgtttccacctacgccgatgaagttttgggtgatgtccaagtttacccagccagaggtaccgttgccttcggttccggtttgcacggttgggctttcactatccgtcaattcgccaccagatatgctaagaaattcggtgtcgacaaggccaagatgatggacagattatggggtgactctttcttcaacccaaagaccaagaagtggaccaacaaggacactgatgctgaaggtaagccattggaaagagctttcaacatgttcatcttggacccaatcttcagattattcactgctatcatgaacttcaagaaagacgaaattccagttttgctagaaaagttggaaattgtcttgaagggtgacgaaaaggacttggaaggtaaggccttgttgaaggttgttatgagaaagttcttgccagctgccgatgccttattggaaatgattgtcttgcacttgccatctccagtcactgctcaagcctacagagctgaacaattatacgaaggtccagctgacgatgccaactgtattgctatcaagaactgtgatccaaaggctgatttgatgttgtacgtctccaagatggtgccaacctctgataagggtagattctacgccttcggtagagtttttgccggtactgttaagtccggtcaaaaggtcagaatccaaggtccaaactacgttccaggtaagaaggacgatttgttcatcaaggccattcaaagagttgttttgatgatgggtagatttgtcgaaccaatcgatgactgtccagccggtaacattatcggtttagtcggtatcgatcaattcttgttgaagactggtactttgaccaccagtgaaactgctcacaacatgaaggtcatgaaattctctgtctctccagttgtgcaagtcgctgtcgaagtcaagaacgctaacgacttaccaaaattggtcgaaggtttgaagagattgtccaagtctgatccatgtgtcttgacctatatgtctgaatccggtgaacatatcgttgctggtaccggtgaattgcatttggaaatttgtttgcaagatttggaacacgaccacgctggtgttccattgaagatctccccaccagttgtcgcttacagagaaactgttgaaagtgaatcttctcaaactgctttgtccaagtctccaaacaagcataacagaatctacttgaaggctgaaccaattgacgaagaagtctctttggctattgaaaacggtatcatcaacccaagagatgatttcaaggccagagctagaatcatggctgacgactacggttgggatgtcaccgatgccagaaagatctggtgtttcggtccagacggtaacggtccaaacttggttattgaccaaactaaggctgtccaatacttgcacgaaatcaaggattccgttgttgctgctttccaatgggctaccaaggaaggtccaattttcggtgaagaaatgagatctgtcagagttaacattttggatgttactttacatgccgatgctatccacagaggtggtggtcaaatcatcccaaccatgagaagagctacttacgccggtttcttgttggctgatccaaagatccaagaaccagttttcttggtcgaaattcaatgtccagaacaagccgtcggtggtatctactccgtcttaaacaagaagagaggtcaagtcgtttctgaagaacaaagaccaggtactccattgtttaccgtcaaggcctacttgccagttaacgaatctttcggtttcactggtgaattgagacaagctaccggtggtcaagctttcccacaaatggttttcgaccattggtccactttaggttctgacccattggacccaacctctaaggctggtgaaattgttcttgctgctcgtaagagacacggtatgaaggaagaagttccaggctggcaagaatattacgacaaattgtaa

SEQ ID NO: 10392 - DNA, 2529 bp, Artificial Sequence
  Description of Artificial Sequence: Synthetic polynucleotide
atggttgctttcactgttgaccaaatgcgttctttaatggacaaagttaccaatgtgcgtaacatgtccgttattgctcacgtcgatcatggtaagtccactttgaccgattccttggtccaaagagccggtattatttccgctgctaaggctggtgaagctcgtttcaccgataccagaaaggatgaacaagaaagaggtatcactatcaagtctaccgctatttctttgtactctgaaatgtctgacgaagatgtcaaggaaatcaagcaaaagaccgacggtaactccttcttgatcaacttgatcgactctccaggtcacgttgacttctcctctgaagttactgccgctttacgtgtcactgacggtgctttggttgtcgtcgacaccattgaaggtgtctgtgtccaaaccgaaactgttttgagacaagctttgggtgaaagaatcaagcctgttgttgttatcaacaaggtcgacagagctttgttggaattgcaagtttctaaggaagatttataccaaacctttgccagaactgttgaatccgttaacgtcatcgtttccacctacgccgatgaagttttgggtgatgtccaagtttacccagccagaggtaccgttgccttcggttccggtttgcacggttgggctttcactatccgtcaattcgccaccagatatgctaagaaattcggtgtcgacaaggccaagatgatggacagattatggggtgactctttcttcaacccaaagaccaagaagtggaccaacaaggacactgatgctgaaggtaagccattggaaagagctttcaacatgttcatcttggacccaatcttcagattattcactgctatcatgaacttcaagaaagacgaaattccagttttgttggaaaagttggaaattgtcttgaagggtgacgaaaaggacttggaaggtaaggccttgttgaaggttgttatgagaaagttcttgccagctgccgatgccttattggaaatgattgtcttgcacttgccatctccagtcactgctcaagcctacagagctgaacaattatacgaaggtccagctgacgatgccaactgtattgctatcaagaactgtgatccaaaggctgatttgatgttgtacgtctccaagatggtgccaacctctgataagggtagattctacgccttcggtagagtttttgccggtactgttaagtccggtcaaaaggtcagaatccaaggtccaaactacgttccaggtaagaaggacgatttgttcatcaaggccattcaaagagttgttttgatgatgggtagatttgtcgaaccaatcgatgactgtccagccggtaacattatcggtttagtcggtatcgatcaattcttgttgaagactggtactttgaccaccagtgaaactgctcacaacatgaaggtcatgaaattctctgtctctccagttgtgcaagtcgctgtcgaagtcaagaacgctaacgacttaccaaaattggtcgaaggtttgaagagattgtccaagtctgatccatgtgtcttgacctatatgtctgaatccggtgaacatatcgttgctggtaccggtgaattgcatttggaaatttgtttgcaagatttggaacacgaccacgctggtgttccattgaagatctccccaccagttgtcgcttacagagaaactgttgaaagtgaatcttctcaaactgctttgtccaagtctccaaacaagcataacagaatctacttgaaggctgaaccaattgacgaagaagtctctttggctattgaaaacggtatcatcaacccaagagatgatttcaaggccagagctagaatcatggctgacgactacggttgggatgtcaccgatgccagaaagatctggtgtttcggtccagacggtaacggtccaaacttggttattgaccaaactaaggctgtccaatacttgcacgaaatcaaggattccgttgttgctgctttccaatgggctaccaaggaaggtccaattttcggtgaagaaatgagatctgtcagagttaacattttggatgttactttacatgccgatgctatccacagaggtggtggtcaaatcatcccaaccatgagaagagctacttacgccggtttcttgttggctgatccaaagatccaagaaccagttttcttggtcgaaattcaatgtccagaacaagccgtcggtggtatctactccgtcttaaacaagaagagaggtcaagtcgtttctgaagaacaaagaccaggtactccattgtttaccgtcaaggcctacttgccagttaacgaatctttcggtttcactggtgaattgagacaagctaccggtggtcaagctttcccacaaatggttttcgaccattggtccactttaggttctgacccattggacccaacctctaaggctggtgaaattgttcttgctgctcgtaagagacacggtatgaaggaagaagttccaggctggcaagaatattacgacaaattgtga

SEQ ID NO: 10393 - DNA, 1230 bp, Saccharomyces cerevisiae
atgtttaacatgaatctactttctacaccttcttctgaagagggttctccacagaataggtcatcttcaatgtcttctgttgagggcaagaaggatagggacacctttactaatttgcaaaacgaatttgatggtaaagtatttggcgtctcactcgaggaatcactgaaagttgctcaagaggaagtaattatccaaaaaagtacaaatgaaattggttccataccggtggtaatagcaaaaagtgggaaatacctaaaagagaatgcattagacacaacaggaattttccgtattgcgggaagcaataaacgtgttagagagctacaagctgttttctctaaaccgcccgattatggtcgtaaatttgaaggatggtgtgatttcaatgttcatgacattgcaactttattaaaaagatatttgaactcattaagtgagcctttggttcccctagcattatacgacatttttagaaatccaatattagaaaacccaaaaataaatgagcacaaagaacaaatcattaaggactacgaagatatttatatgctcttaccacaacaaaatcgccatttaatactttatttagccgcgctcttgaatttatttgcaagaaatgaaaagaagaatttaatgtcagcaagcaatttagcggccatcgtacaaccctcacttttgtctcatcccaaggatgaaatgtgcccgaaagagtatgaggcttccagaactgtcatcgaattcctcatactacacgcttcagatataataccgaatacggaaaaagcgaataaggacaccatgccgcatgcaggaacagtagcaaagtttaacaacattaccgttcctgaaatggctattgactccgatgaagaagattttgtgcacccttcaatagatgaccatatgcttccaaggtcacgtgcactttctgactccaacaattttaccatacatcatcatcatcatcatcatcatgcactgtttcctagcccaatagattttgataacaatgggctttctgtaccgagatcctttaaaggtagaacattgagtgcagagtccctttctcccagacttagtaaattacttgggaacgttggaaacagcagcaatactggcatcaaagaccctacagaaagagttcctagaggtgaacataaaaccaaacacaaacaacgacagtcatggttgagaagactcactagcccttctagaacgcagccttag

SEQ ID NO: 10394 - DNA, 1230 bp, Artificial Sequence
  Description of Artificial Sequence: Synthetic polynucleotide
atgtttaacatgaatttactttctacaccttcttctgaagagggttctccacagaataggtcttcttctatgtcttctgttgagggcaagaaggatagggacacctttactaatttgcaaaacgaatttgatggtaaagtatttggcgtctctctcgaggaatctttgaaagttgctcaagaggaagtaattatccaaaaaagtacaaatgaaattggttccataccggtggtaatagcaaaaagtgggaaatacttgaaagagaatgcattagacacaacaggaattttccgtattgcgggaagcaataaacgtgttagagagttacaagctgttttctctaaaccgcccgattatggtcgtaaatttgaaggatggtgtgatttcaatgttcatgacattgcaactttattaaaaagatatttgaactctttaagtgagcctttggttcccttggcattatacgacatttttagaaatccaatattagaaaacccaaaaataaatgagcacaaagaacaaatcattaaggactacgaagatatttatatgctcttaccacaacaaaatcgccatttaatactttatttagccgcgctcttgaatttatttgcaagaaatgaaaagaagaatttaatgtctgcaagcaatttagcggccatcgtacaaccctcccttttgtctcatcccaaggatgaaatgtgcccgaaagagtatgaggcttccagaactgtcatcgaattcctcatattacacgcttctgatataataccgaatacggaaaaagcgaataaggacaccatgccgcatgcaggaacagtagcaaagtttaacaacattaccgttcctgaaatggctattgactccgatgaagaagattttgtgcacccttccatagatgaccatatgcttccaaggtctcgtgcactttctgactccaacaattttaccatacatcatcatcatcatcatcatcatgcattatttcctagcccaatagattttgataacaatgggctttctgtaccgagatcctttaaaggtagaacattgagtgcagagtccctttctcccagacttagtaaattacttgggaacgttggaaacagcagcaatactggcatcaaagaccctacagaaagagttcctagaggtgaacataaaaccaaacacaaacaaagacagagttggttgagaagactcactagcccttctagaacgcagccttga

SEQ ID NO: 10395 - DNA, 1110 bp, Saccharomyces cerevisiae
atgttgagaaatactttttttagaaacacctcgaggaggtttttggctactgtaaagcaaccttcaatcggaagatataccggcaaacctaacccttctaccggcaaatacacggtctcgttcattgaaggtgatggtatcggacctgaaatttccaagtctgtaaagaaaatctttagtgcagcaaacgtccccatagaatgggaatcttgtgatgttagccctatctttgtcaacggattaacgaccattcctgaccctgccgtacaatctatcacaaaaaacctggttgcactaaaaggtccactagctacacctattggtaaaggtcacagatctttgaatttgacattgagaaaaacatttgggttatttgccaacgttcgtcccgcaaagtctattgaaggttttaagaccacttacgaaaacgttgatttagttcttatcagagagaataccgaaggtgaatattctggtatcgaacacatagtttgccctggcgttgttcaatctattaaactgatcacaagagatgcctctgagcgagtcattagatacgcttttgaatatgcaagagccatcggcagaccaagagttattgtggtacataaatctactatccagagattagctgatggtttattcgttaatgttgccaaagaactatccaaagagtatcctgaccttactttagaaactgaacttattgataacagtgtgttaaaggtggtcaccaacccatctgcttacacagacgctgtttctgtttgtccaaatctatacggtgatatcttgtccgacttgaactctggtttgagcgccggttctttaggtttaactccatctgccaatattggtcataaaatctcgatctttgaagctgtccatggctctgcccctgatattgccggtcaagataaagcgaatccaactgccctacttttatcttcagtaatgatgttaaaccacatgggtctaacgaatcatgctgaccaaattcaaaatgcagtattgtctactatcgcatcaggtccagaaaacagaacaggtgacttggctggtactgctactacttcatcattcactgaagcagtcatcaagagattataa

SEQ ID NO: 10396 - DNA, 1110 bp, Artificial Sequence
  Description of Artificial Sequence: Synthetic polynucleotide
atgttgagaaatactttttttagaaacacctctaggaggtttttggctactgtaaagcaaccttccatcggaagatataccggcaaacctaacccttctaccggcaaatacacggtctctttcattgaaggtgatggtatcggacctgaaatttccaagtctgtaaagaaaatctttagtgcagcaaacgtccccatagaatgggaatcttgtgatgttagccctatctttgtcaacggattaacgaccattcctgaccctgccgtacaatctatcacaaaaaacttggttgcattgaaaggtccattggctacacctattggtaaaggtcacagatctttgaatttgacattgagaaaaacatttgggttatttgccaacgttcgtcccgcaaagtctattgaaggttttaagaccacttacgaaaacgttgatttagttcttatcagagagaataccgaaggtgaatattctggtatcgaacacatagtttgccctggcgttgttcaatctattaaattaatcacaagagatgcctctgagagagtcattagatacgcttttgaatatgcaagagccatcggcagaccaagagttattgtggtacataaatctactatccagagattagctgatggtttattcgttaatgttgccaaagaattatccaaagagtatcctgaccttactttagaaactgaacttattgataacagtgtgttaaaggtggtcaccaacccatctgcttacacagacgctgtttctgtttgtccaaatctttacggtgatatcttgtccgacttgaactctggtttgagcgccggttctttaggtttaactccatctgccaatattggtcataaaatctccatctttgaagctgtccatggctctgcccctgatattgccggtcaagataaagcgaatccaactgccttacttttatcttctgtaatgatgttaaaccacatgggtttaacgaatcatgctgaccaaattcaaaatgcagtattgtctactatcgcatctggtccagaaaacagaacaggtgacttggctggtactgctactacttcttctttcactgaagcagtcatcaagagattatga

SEQ ID NO: 10397 - DNA, 1869 bp, Saccharomyces cerevisiae
atgagattacattatagaagaagatttaattttttaaggagaatactttttatattatgcattacttcattgtatttatcgagagattcactaaagctacatgcaaaaaatgtattaatggatcataatgtagcagaatatcatggcggaatgatagacgatattcaaatcctgcggtgctaccattggtacaggcaatgtagttctttgtatgccccgaaattacacccctccaatactgctaaaaagatcaaagacaaaaacagcattctgtggaccagagtttctaagaatattactgtagagacattgtattcacttcagtctggaccattctacaacagttacttatatgttcatctgaaagatttccaaagtaatccaaaaaacacaataaaagaactagccatagcaagggactcagcactaatacccctacaagtgctgagagacattaataagttggtgaaatcgagcgacagttctgtctttcacaatcatgtgtatctacgagaaaagcctacttcgtcatggtggaagctgcttttcggcatatccgttgatacagataacatagctgtgttcggtgaggagtgggtatacaaggggagcggcatatggtgtaagtatatccttaatgatgatgataatgacgctcctataactaatttggaaatatatctaggatcatcgtttattgaatcgaggccttcttggaaagaagttatccatgaatttcatagaaataacataccttctctgcccatatcaattacaagaaagcttgaaaccaaaaaccatcatcacaaattttctaatggattgctaggttctttgagaacacccagcaaagacattaatatccaagtcgatgcagattacaaaataacatctccccatatacaattttcgaggggacaaagatcattcaaaattctccaaataactgattttcatttcaaatgtacggataatagcatgaccgtaatcaatgaaataaaaacagtaaattttattgatagggtactcgcatcagaaaaccctgatttagttgtgatcacaggtgatttgttagactcacataatactatcgactatcaaacgtgcattatgaaagttgtccaaccaatgatttctaataaaataccctacgcaatttcattgggtgtttctgacgaatccaatttggccacatcggcacaaattagagactttatcaggaatttaccttacacatttaacaacgttgcatcagaagagggtcatatggccatagaagtctcatttaaaaagaagctcacgaagaatactcttttggaaagagacattgataccgaagacgaaacaaacccatcagaggctttatttttcgtctttgattcatttgcgcccgtcaataatttcctacaagattataacgacctgattgggaaaatagactttggcttggcatttcaatattttccattatcggaatataggcctcatggtttatttcctattattgggcagtataatgagaggtctaccttaacagtagatacgccaaggtctagaggacaagtttcaatgacgatcaatggcaaacattacaaaagcttccttgatatcctgagtctttggaatataaagggtgtcagttgcggacatgaacataataatgactgttgcttacagtcaaaaaatgagatgtggttatgttacggtgggtccgctggtataggcttgccgagaatccaaggtatatatccaaccgttagattatttaacttggatgatattttggacgaaataacttcgtggaagaggaatagcaatcttgttgacgaggtttacgattatcagtacatctataaggggaagcaataa

SEQ ID NO: 10398 - DNA, 1869 bp, Artificial Sequence
  Description of Artificial Sequence: Synthetic polynucleotide
atgagattacattatagaagaagatttaattttttaaggagaatactttttatattatgcattacttctttgtatttatctagagattctttgaagttgcatgcaaaaaatgtattaatggatcataatgtagcagaatatcatggcggaatgatagacgatattcaaatcttaagatgctaccattggtacaggcaatgtagttctttgtatgccccgaaattacacccctccaatactgctaaaaagatcaaagacaaaaacagcattttatggaccagagtttctaagaatattactgtagagacattgtattctcttcagtctggaccattctacaacagttacttatatgttcatttgaaagatttccaaagtaatccaaaaaacacaataaaagaattggccatagcaagggactctgcattaatacccttgcaagtgttgagagacattaataagttggtgaaaagtagcgacagttctgtctttcacaatcatgtgtatttaagagaaaagcctacttcttcttggtggaagcttcttttcggcatatccgttgatacagataacatagctgtgttcggtgaggagtgggtatacaaggggagcggcatatggtgtaagtatatccttaatgatgatgataatgacgctcctataactaatttggaaatatatttgggatcttcttttattgaaagtaggccttcttggaaagaagttatccatgaatttcatagaaataacataccttctttacccatatctattacaagaaagcttgaaaccaaaaaccatcatcacaaattttctaatggattgttgggttctttgagaacacccagcaaagacattaatatccaagtcgatgcagattacaaaataacatctccccatatacaatttagcaggggacaaagatctttcaaaattctccaaataactgattttcatttcaaatgtacggataatagcatgaccgtaatcaatgaaataaaaacagtaaattttattgatagggtactcgcatctgaaaaccctgatttagttgtgatcacaggtgatttgttagactctcataatactatcgactatcaaacgtgcattatgaaagttgtccaaccaatgatttctaataaaataccctacgcaatttctttgggtgtttctgacgaatccaatttggccacaagtgcacaaattagagactttatcaggaatttaccttacacatttaacaacgttgcatctgaagagggtcatatggccatagaagtcagttttaaaaagaagctcacgaagaatactcttttggaaagagacattgataccgaagacgaaacaaacccaagtgaggctttatttttcgtctttgattcttttgcgcccgtcaataatttcttacaagattataacgacttgattgggaaaatagactttggcttggcatttcaatattttccattatctgaatataggcctcatggtttatttcctattattgggcagtataatgagaggtctaccttaacagtagatacgccaaggtctagaggacaagtttctatgacgatcaatggcaaacattacaaaagcttccttgatatcttaagtctttggaatataaagggtgtcagttgcggacatgaacataataatgactgttgcttacagtccaaaaatgagatgtggttatgttacggtgggtccgctggtataggcttgccgagaatccaaggtatatatccaaccgttagattatttaacttggatgatattttggacgaaataacttcttggaagaggaatagcaatcttgttgacgaggtttacgattatcagtacatctataaggggaagcaatga

SEQ ID NO: 10399 - DNA, 2016 bp, Saccharomyces cerevisiae
atgatggataatcaggctgtaaagtcactgctagaaatgggtattccacacgaagtagctgtggacgccctccaaagaactggcggtaatttggaggcagcagttaacttcatcttttcgaacgagctgccggagcaagcggaaatgggtgaggagaatgatggcagtcagcctaggatttctgagaacaaaatagtggctggaaccaagccctgcgatgttccgaacaacggggaccaagacattgatatgccggatgtgagtggtgtcgatgttgattatgatgacgatgaagacatcacggatgaacgcagcggttctaatagcaccagcggatgcagggttactgctcagaactacgatcgttattctatatcggagacatccattcctcccccctcttatagtatagtacaacacaacgagttcaagtcgaacgtgggcgatcctacggttgtgttgccgctacccttgaatagtctaattgagagctattttgggctgtttgcgttgctcacggccgtgtatttcccacacgtgttcttgaaaccggactttaaggatttgaactatagggcagactggttcaagggctcatcgtttacggagcccaaatacagacttgcatattgcgaggcagaagatggttccactacgtcggagatcgtgctggccagcggacctaatgaagggttgcaaccgcatctgctctggcagttgcaaaaactcatctccgtggttaacacgcgaaagtgtgaaagagcctttgtttcggccaaggtgtttacgtcgtccttggaaccgcaattgaggtccaagctggccgattccgagcatctttatgaggtgctcccagcgtttatcaaatcattggcagtggatttggaaatgtgtcctgggatcagagaccgggaaacaagaagtctctttatatcttctgctttgcatactccgaacaagaatgaacctccaatggagacgtttttgtccttgtttcattttcttcctgaagagtacgattctaatctatataaaatgttcaacgttttattgtaccccgaagaagaggaagaagaagaagacgtgattcgtggtggcgagcaagaagaggcgagatatgtggaaccggagaatactttgaaggaggtggcacccgtattaacaatcctgttcaatgaactagaaacaaatacagaatcagtgtctctacccaatggcgtggatataccgcttgagttttacccacagctttacaccaaacagtgcaaagaccaactaataagacatattatttctaaacgaaagcaagcgcggaccagatccagatgcttgcttcaagagatcaacgagttaaagagttaccaaggcaaaaacatatccactattctagagtcgacgctggcgtatctacaaacaattcctgacgatgctaataatgaagcagcaaagcagatcgcatcgttgaaagatacattaaattctgcgagagccgctaaaatggaggaatataaggacttggcgtccaaactgcatggagaatggaacctttcacatccagagacacacataatcaacactgcaaagcaattgggactgatcgaaaatccctacatcctcacaatggcagcactatcgccatattcatactttatcagaagcagaaacggtgcatggtcatggatacaaagtaatacgttgggaacagaattcaaggtgaaaaaatgttcgtcgccttctgtcgttcaagaagccatcaagcatggcacgaagtacgcaagtgaaactccgctgatgttcatatactgtgaagagggtaaaattcccacggaagaagtagtcgcggaagcgttgaaaagcaatagcgggtgcttaaaatttgctgaggatgaccaaaattcattaaaaacattgcgttcgcaatttttcgatggtatgggagatcctgaacaagccaccaacaatattaacaatggtaacgataatgacaatgacgatgacatcgattctgataattag

SEQ ID NO: 10400 - DNA, 2016 bp, Artificial Sequence
  Description of Artificial Sequence: Synthetic polynucleotide
atgatggataatcaggctgtaaagtctttattggaaatgggtattccacacgaagtagctgtggacgccctccaaagaactggcggtaatttggaggcagcagttaacttcatcttttccaacgagttaccggagcaagcggaaatgggtgaggagaatgatggcagtcagcctaggatttctgagaacaaaatagtggctggaaccaagccctgcgatgttccgaacaacggggaccaagacattgatatgccggatgtgagtggtgtcgatgttgattatgatgacgatgaagacatcacggatgaacgcagcggttctaatagcaccagcggatgcagggttactgctcagaactacgatcgttattctatatctgagacatccattcctcccccctcttatagtatagtacaacacaacgagttcaagtctaacgtgggcgatcctacggttgtgttgccgttgcccttgaatagtttgattgagagctattttgggttgtttgcgttgctcacggccgtgtatttcccacacgtgttcttgaaaccggactttaaggatttgaactatagggcagactggttcaagggctcctcttttacggagcccaaatacagacttgcatattgcgaggcagaagatggttccactacgagtgagatcgtgcttgccagcggacctaatgaagggttgcaaccgcatcttctctggcagttgcaaaaactcatctccgtggttaacacgagaaagtgtgaaagagcctttgtttctgccaaggtgtttacgtcttccttggaaccgcaattgaggtccaagttggccgattccgagcatctttatgaggtgctcccagcgtttatcaaatctttggcagtggatttggaaatgtgtcctgggatcagagacagagaaacaagaagtctctttatatcttctgctttgcatactccgaacaagaatgaacctccaatggagacgtttttgtccttgtttcattttcttcctgaagagtacgattctaatttatataaaatgttcaacgttttattgtaccccgaagaagaggaagaagaagaagacgtgattcgtggtggcgagcaagaagaggcgagatatgtggaaccggagaatactttgaaggaggtggcacccgtattaacaatcttattcaatgaattggaaacaaatacagaatctgtgtctttacccaatggcgtggatataccgcttgagttttacccacagctttacaccaaacagtgcaaagaccaattgataagacatattatttctaaaagaaagcaagcgcgtaccagatccagatgcttgcttcaagagatcaacgagttaaagagttaccaaggcaaaaacatatccactattttagagtctacgttggcgtatttacaaacaattcctgacgatgctaataatgaagcagcaaagcagatcgcaagtttgaaagatacattaaattctgcgagagccgctaaaatggaggaatataaggacttggcgtccaaattgcatggagaatggaacctttctcatccagagacacacataatcaacactgcaaagcaattgggattgatcgaaaatccctacatcctcacaatggcagcattatctccatattcttactttatcagaagcagaaacggtgcatggtcctggatacaaagtaatacgttgggaacagaattcaaggtgaaaaaatgttcttctccttctgtcgttcaagaagccatcaagcatggcacgaagtacgcaagtgaaactccgttaatgttcatatactgtgaagagggtaaaattcccacggaagaagtagtcgcggaagcgttgaaaagcaatagcgggtgcttaaaatttgctgaggatgaccaaaattctttaaaaacattgcgttctcaatttttcgatggtatgggagatcctgaacaagccaccaacaatattaacaatggtaacgataatgacaatgacgatgacatcgattctgataattga

SEQ ID NO: 10401 - DNA, 2301 bp, Saccharomyces cerevisiae
atgagtgaagaggaaacggtctcagccccagctccagcttctacaccggccccggctggaaccgatgtaggtagtggtggagcagcagctggaatagctaatgctggtgctgaaggcggcgacggtgccgaggatgttaagaaacatgggtcgaagatgctagtggggcccaggccgccacaaaatgcgatattcatccataagctataccagattctggaggacgaatcgctacacgacttgatatggtggaccccttcgggcttatccttcatgattaagcctgtggaacggtttagtaaggctttggctacatatttcaagcatactaatatcacgagctttgtaagacagttgaacatttacggctttcacaaggtgtcgcatgatcatagcagcaacgacgctaatagtggcgacgacgccaatactaatgatgacagcaatactcacgatgataatagtggcaacaaaaacagtagtggcgacgaaaataccggtggcggtgtccaagaaaaggagaaaagtaaccccactaaaatctgggaatttaagcatagttctggtattttcaagaaaggtgacattgagggactcaaacacattaagagaagagcttcttcccgtaataactcctcaattaacagtcgaaagaattctagtaatcaaaactacgatatagattccggtgcaagagtaagaccctcttcgattcaagacccgtccaccagttccaattcctttggtaatttcgttccgcaaattccgggcgccaataactctatccccgagtactttaataactctcatgtaacttacgaaaacgcaaaccatgccccgctggaatccaataacccggaaatgcaagagcaaaacagacctccgaactttcaagatgaaacactgaaacatttgaaagaaataaattttgatatggttaagattatagagtctatgcagcatttcatatctttgcaacacagtttttgttcacagagtttcaccttcaagaatgtgagcaagaaaaaatcggaaaatatcgtgaaggatcaccaaaagcaacttcaggcattcgaaagcgatatgttaactttcaaacagcacgtcatgtcgagggcccaccgtacaatagattctctttgtgctgtaaatgctgccgctaccgctgcctctgtcgcccctgcacccgcgcccacatccacatctgcatatgcacccaaatctcagtatgagatgatggttcctccagggaaccagtatgtcccgcagaaatcttcctcgaccacgaacatcccttcgagattcaacacggcttcagtgccgccctcgcaactttttgtacaataccaaccgcagtcgcaacaacatgtgacttatgcgaagcaaccggcacatgtaccaaactttatcaatcagccgatacccatccaacaactacctccacaatatgcagacacttttagcactccacaaatgatgcacaatccttttgcctcgaaaaataacaacaaaccgggcaacacgaagaggaccaatagtgttctcatggacccgctgactcccgcagcgagtgttggagttcagggtccactaaactatcctatcatgaatattaatccttctgtccgtgactacaacaagcctgtccctcaaaatatggctccgagtccaatatatcctattaatgaaccaacaacgagattgtattctcaaccaaaaatgagaagtctcgggtctacaagctctttgcccaacgatagaagaaacagtcctctgaagctgacaccgagatcatcgttgaatgaagatagtctgtatcccaaacctagaaactctctcaaatccagtatttcgggcacgtctttatcctcctcttttacactagttgccaacaatccagccccaattcggtactctcagcagggattgcttcgctcattaaacaaagctgctaattgtgctccagattcggtaactccattagactcgtctgtcttgacgggccctcctccaaaaaacatggacaatcttcctgctgtttcttcaaatttaataaactcccccatgaacgtcgagcacagctcaagcctatcacaagcagaacctgcaccacaaatagaactaccgcagccatctttgcccacaacgagcaccactaagaatactggcgaggctgacaatagtaagagaaaagggagcggtgtttattctttactgaatcaagaggatagcagcacgtccagtgctgatcctaaaactgaagataaggccgctccggcactcaaaaaggttaagatgtga

SEQ ID NO: 10402 - DNA, 2301 bp, Artificial Sequence
  Description of Artificial Sequence: Synthetic polynucleotide
atgagtgaagaggaaacggtctctgccccagctccagcttctacaccggccccggctggaaccgatgtaggtagtggtggagcagcagctggaatagctaatgctggtgctgaaggcggcgacggtgccgaggatgttaagaaacatgggtccaagatgttggtggggcccaggccgccacaaaatgcgatattcatccataagttgtaccagattttagaggacgaatctttacacgacttgatatggtggaccccttccggcttatccttcatgattaagcctgtggaaagatttagtaaggctttggctacatatttcaagcatactaatatcacgagctttgtaagacagttgaacatttacggctttcacaaggtgtctcatgatcatagcagcaacgacgctaatagtggcgacgacgccaatactaatgatgacagcaatactcacgatgataatagtggcaacaaaaacagtagtggcgacgaaaataccggtggcggtgtccaagaaaaggagaaaagtaaccccactaaaatctgggaatttaagcatagttctggtattttcaagaaaggtgacattgagggactcaaacacattaagagaagagcttcttcccgtaataactccagtattaacagtaggaagaattctagtaatcaaaactacgatatagattccggtgcaagagtaagaccctcttccattcaagacccgtccaccagttccaattcctttggtaatttcgttccgcaaattccgggcgccaataactctatccccgagtactttaataactctcatgtaacttacgaaaacgcaaaccatgccccgttggaatccaataacccggaaatgcaagagcaaaacagacctccgaactttcaagatgaaacattaaaacatttgaaagaaataaattttgatatggttaagattatagagtctatgcagcatttcatatctttgcaacacagtttttgttctcagagtttcaccttcaagaatgtgagcaagaaaaaaagtgaaaatatcgtgaaggatcaccaaaagcaacttcaggcattcgaaagcgatatgttaactttcaaacagcacgtcatgtctagggcccaccgtacaatagattctctttgtgctgtaaatgctgccgctaccgctgcctctgtcgcccctgcacccgcgcccacatccacatctgcatatgcacccaaatctcagtatgagatgatggttcctccagggaaccagtatgtcccgcagaaatcttcctccaccacgaacatcccttccagattcaacacggcttctgtgccgccctctcaactttttgtacaataccaaccgcagtctcaacaacatgtgacttatgcgaagcaaccggcacatgtaccaaactttatcaatcagccgatacccatccaacaattacctccacaatatgcagacacttttagcactccacaaatgatgcacaatccttttgcctccaaaaataacaacaaaccgggcaacacgaagaggaccaatagtgttctcatggacccgttgactcccgcagcgagtgttggagttcagggtccattgaactatcctatcatgaatattaatccttctgtccgtgactacaacaagcctgtccctcaaaatatggctccgagtccaatatatcctattaatgaaccaacaacgagattgtattctcaaccaaaaatgagaagtctcgggtctacaagctctttgcccaacgatagaagaaacagtcctttgaagttaacaccgagatcttctttgaatgaagatagtctttatcccaaacctagaaactctctcaaatccagtatttctggcacgtctttatcctcctcttttacattagttgccaacaatccagccccaattagatactctcagcagggattgcttcgctctttaaacaaagctgctaattgtgctccagattctgtaactccattagactcttctgtcttgacgggccctcctccaaaaaacatggacaatcttcctgctgtttcttccaatttaataaactcccccatgaacgtcgagcacagcagcagcttatctcaagcagaacctgcaccacaaatagaattaccgcagccatctttgcccacaacgagcaccactaagaatactggcgaggctgacaatagtaagagaaaagggagcggtgtttattctttattgaatcaagaggatagcagcacgtccagtgctgatcctaaaactgaagataaggccgctccggcactcaaaaaggttaagatgtga

SEQ ID NO: 10403 - DNA, 2646 bp, Saccharomyces cerevisiae
atgtcgcaagaagaagcagaatccagtattatttatgaggaacccattgatattccgttagaggatgatgacgatgaggatgaactggaagaagaaaatagcgtacctttaagcagccaggcggatcaagaaaatgcggagaatgagtcagacgatagtgtcgataacgtagttggatctgagacacccagaagtgtaacaggtctttctgttgacccaagagacgttgcagacgaagaagatgaagatgaagaaggggaagacgaagatgaagacgaagacgacaatgatgttgacaatgaggacgaaaatgataatgataatgccaacgaaaatgaaaatgaattagggagctctagagataagagggcaccacctgctgtgcagactagtaaacgttataagaaatatccgaagctagatcccgcaaaagcacctcccgggaagaaagtcccgctacatcttttggagaagaggagactaggacgtattaaagctgctgaagaatttgccaagacgttgaaaaaaattggcattgagaaagtggagacaactactttacctgccactggcctgttccaacctttaatgttaatcaaccaaaaaaactactcatcagattatctgaaaaaagacgatcaaatatttgcacttagagatagaaaatttttgagaaataacaacactagccaaatatctagtaccaacacaccagatgttatagatttaaagagtttgccccactcagaagcgagtgcagcaccacttaatgacgagatagatctaaatgatccaacagcaactatcgtgatacatcctggatcaaattctataaagataggatttcccaaagatgaccatcctgtcgtagttccaaattgtgtagcggtacctaaaaaatggctggatcttgaaaatagtgaacatgttgaaaacgtttgccttcaaagagaacagtcagaagagtttaacaacataaagtcggagatggaaaagaattttagagaacgtatgaggtattataaaagaaaggtaccaggtaatgctcacgaacaggtagtatctttcaatgaaaattccaaacctgagattatttcagagaaaaatgatccatctcctatagaatggatatttgatgactcaaaattatactatggttcagatgcattgaggtgcgtggacgaaaaatttgttattagaaagcctttcagaggtggctcttttaatgtcaagtcaccatattataaatcgttggcagaattaatctcagacgttaccaagcttttggagcatgcacttaactcagagactttaaacgttaagcctaccaaatttaatcagtacaaggtcgtgttggtgataccagacatattcaagaaaagtcacgtagagacgttcattagagttctactcaccgagttacaatttcaagcagtcgctattatacaagaatcattagcgacttgttacggtgccgggatcagtacctccacatgcgtagtaaatataggcgctgctgaaaccaggatcgcctgtgttgatgaaggaacagttttggaacatagtgcaattacgttagattatggtggagatgatattacaaggctcttcgctctatttttgctacaaagtgatttccccctacaggattggaagatcgattctaaacatggatggcttcttgctgaacggctgaagaaaaatttcaccactttccaagatgctgatgttgccgttcagttgtacaattttatgaaccgctcacccaatcagccgactgaaaagtacgaattcaagctgttcgacgaagttatgttagcaccattggccttatttttcccacaaattttcaagttgatacgaacttcctctcacaagaattccagcctagaatttcagttgcctgaatctcgtgacctctttacaaacgaattgaatgactggaactccttgtcacaattcgaaagcaaagagggaaatttgtattgtgatttgaatgacgatctcaagatcttaaacagaatattagatgcccataacataattgatcaactccaggataagcctgaaaactatggaaatactctaaaggaaaattttgcacctttagaaaaggctatcgttcaaagtatcgccaatgcatctataacagctgatgtaacaagaatgaactcattttattcgaatattcttatcgttggtggcagttccaaaatacctgctttagattttattttaactgatagaatcaacatttggaggccctctttgttgagttcggcatcgttcccgcaattttacaaaaaactgactaaagaaatcaaagatttagaaggtcattatgtaaatgcccctgacaagactgaagatgaaaacaagcaaattttgcaagcccaaatcaaggaaaagattgtagaagagctggaagagcaacatcaaaatattgagcaccaaaatggtaacgaacacatttttccagtgagcattatcccaccaccacgtgatatgaatcccgctctaataatttggaaaggtgcgagcgttttggcgcaaattaaacttgtcgaagaactgtttattacgaacagcgattgggatgttcacgggagtagaatcttacaatataaatgtattttcacgtactag

SEQ ID NO: 10404 - DNA, 2646 bp, Artificial Sequence
  Description of Artificial Sequence: Synthetic polynucleotide
atgtctcaagaagaagcagaatccagtattatttatgaggaacccattgatattccgttagaggatgatgacgatgaggatgaattggaagaagaaaatagcgtacctttaagcagccaggcggatcaagaaaatgcggagaatgagagtgacgatagtgtcgataacgtagttggatctgagacacccagaagtgtaacaggtctttctgttgacccaagagacgttgcagacgaagaagatgaagatgaagaaggggaagacgaagatgaagacgaagacgacaatgatgttgacaatgaggacgaaaatgataatgataatgccaacgaaaatgaaaatgaattagggagctctagagataagagggcaccacctgctgtgcagactagtaaacgttataagaaatatccgaagttggatcccgcaaaagcacctcccgggaagaaagtcccgcttcatcttttggagaagaggagattaggacgtattaaagctgctgaagaatttgccaagacgttgaaaaaaattggcattgagaaagtggagacaactactttacctgccactggccttttccaacctttaatgttaatcaaccaaaaaaactactcttctgattatttgaaaaaagacgatcaaatatttgcacttagagatagaaaatttttgagaaataacaacactagccaaatatctagtaccaacacaccagatgttatagatttaaagagtttgccccacagtgaagcgagtgcagcaccacttaatgacgagatagatttgaatgatccaacagcaactatcgtgatacatcctggaagtaattctataaagataggatttcccaaagatgaccatcctgtcgtagttccaaattgtgtagcggtacctaaaaaatggcttgatcttgaaaatagtgaacatgttgaaaacgtttgccttcaaagagaacagtctgaagagtttaacaacataaagagtgagatggaaaagaattttagagaacgtatgaggtattataaaagaaaggtaccaggtaatgctcacgaacaggtagtatctttcaatgaaaattccaaacctgagattatttctgagaaaaatgatccatctcctatagaatggatatttgatgactctaaattatactatggttctgatgcattgaggtgcgtggacgaaaaatttgttattagaaagcctttcagaggtggctcttttaatgtcaagtctccatattataaatctttggcagaattaatcagtgacgttaccaagcttttggagcatgcacttaacagtgagactttaaacgttaagcctaccaaatttaatcagtacaaggtcgtgttggtgataccagacatattcaagaaaagtcacgtagagacgttcattagagttttactcaccgagttacaatttcaagcagtcgctattatacaagaatctttagcgacttgttacggtgccgggatcagtacctccacatgcgtagtaaatataggcgctgctgaaaccaggatcgcctgtgttgatgaaggaacagttttggaacatagtgcaattacgttagattatggtggagatgatattacaaggctcttcgctttgtttttgttgcaaagtgatttccccttgcaggattggaagatcgattctaaacatggatggcttcttgctgaaagattaaagaaaaatttcaccactttccaagatgctgatgttgccgttcagttgtacaattttatgaaccgctctcccaatcagccgactgaaaagtacgaattcaagcttttcgacgaagttatgttagcaccattggccttatttttcccacaaattttcaagttgataagaacttcctctcacaagaattccagcttggaatttcagttgcctgaatctcgtgacctctttacaaacgaattgaatgactggaactccttgtctcaattcgaaagcaaagagggaaatttgtattgtgatttgaatgacgatctcaagatcttaaacagaatattagatgcccataacataattgatcaactccaggataagcctgaaaactatggaaatactttgaaggaaaattttgcacctttagaaaaggctatcgttcaaagtatcgccaatgcatctataacagctgatgtaacaagaatgaactctttttattctaatattcttatcgttggtggcagttccaaaatacctgctttagattttattttaactgatagaatcaacatttggaggccctctttgttgagttctgcatctttcccgcaattttacaaaaaattaactaaagaaatcaaagatttagaaggtcattatgtaaatgcccctgacaagactgaagatgaaaacaagcaaattttgcaagcccaaatcaaggaaaagattgtagaagagttagaagagcaacatcaaaatattgagcaccaaaatggtaacgaacacatttttccagtgagcattatcccaccaccacgtgatatgaatcccgctttaataatttggaaaggtgcgagcgttttggcgcaaattaaacttgtcgaagaattatttattacgaacagcgattgggatgttcacgggagtagaatcttacaatataaatgtattttcacgtactga

SEQ ID NO: 10405 - DNA, 990 bp, Saccharomyces cerevisiae
atgttaagatctaccgtttcaaaagcttctctcaaaatttgtcgtcactttcacagagaatctattccttacgataagacgatcaaaaatttgctgcttcccaaggacaccaaggtgatctttcaggggttcacaggtaaacaaggtacttttcatgccagcatctctcaagaatatggtacaaatgttgtgggtggtacgaacccaaaaaaggcgggtcaaacacatttaggccaacctgtctttgcctctgtgaaggacgcgattaaggagactggagccactgccagtgccatctttgttcctccaccgatcgcagctgctgccattaaagaatctattgaagctgaaattccgttagctgtatgtatcactgaaggtattcctcaacatgacatgttatacattgcagaaatgttgcagacacaagataaaacaagattagttgggcccaactgccctggtatcattaacccagcaacaaaggtaagaattggtatccagcccccaaaaatttttcaagctggtaaaatcggtattatttccagatcgggaactttgacatacgaagctgttcagcaaactacaaaaactgaccttggtcaatcactggttattggtatgggtggtgatgcttttcccggtactgattttattgacgccttgaaattatttctagaagatgaaactacagaaggtattattatgttaggtgaaataggtggtaaggccgaaatcgaagctgctcaatttctcaaagaatacaactttagcaggagtaagccgatgccggtggcatctttcatcgcaggaactgttgctggtcaaatgaaaggtgttagaatgggtcactccggtgcaattgtagaaggatctggaactgatgcagaatccaaaaaacaagctttgagagatgttggtgttgccgtcgttgaatctccaggttacttaggtcaagctttactggatcaatttgccaaatttaaatga

SEQ ID NO: 10406 - DNA, 990 bp, Artificial Sequence
  Description of Artificial Sequence: Synthetic polynucleotide
atgttaagatctaccgtttccaaagcttctctcaaaatttgtcgtcactttcacagagaatctattccttacgataagacgatcaaaaatttgttacttcccaaggacaccaaggtgatctttcaggggttcacaggtaaacaaggtacttttcatgccagcatctctcaagaatatggtacaaatgttgtgggtggtacgaacccaaaaaaggcgggtcaaacacatttaggccaacctgtctttgcctctgtgaaggacgcgattaaggagactggagccactgccagtgccatctttgttcctccaccgatcgcagctgctgccattaaagaatctattgaagctgaaattccgttagctgtatgtatcactgaaggtattcctcaacatgacatgttatacattgcagaaatgttgcagacacaagataaaacaagattagttgggcccaactgccctggtatcattaacccagcaacaaaggtaagaattggtatccagcccccaaaaatttttcaagctggtaaaatcggtattatttccagatctggaactttgacatacgaagctgttcagcaaactacaaaaactgaccttggtcaaagtttggttattggtatgggtggtgatgcttttcccggtactgattttattgacgccttgaaattatttttggaagatgaaactacagaaggtattattatgttaggtgaaataggtggtaaggccgaaatcgaagctgctcaatttctcaaagaatacaactttagcaggagtaagccgatgccggtggcatctttcatcgcaggaactgttgctggtcaaatgaaaggtgttagaatgggtcactccggtgcaattgtagaaggatctggaactgatgcagaatccaaaaaacaagctttgagagatgttggtgttgccgtcgttgaatctccaggttacttaggtcaagctttattagatcaatttgccaaatttaaatga

SEQ ID NO: 10407 - DNA, 960 bp, Saccharomyces cerevisiae
atgagcgaggagtgtattgaaaatcctgaacgtattaaaattggtactgatttaatcaacatccgaaataaaatgaacttaaaagaactaatccatccaaacgaggatgaaaactctaccctactcatacttaatcaaaaaattgacattcctagaccgttgttttacaaaatttggaagctgcatgacttgaaggtctgtgcagatggtgcagccaatagattatatgactacctagatgatgacgaaaccctaaggataaaatatcttcccaattatattattggcgatctggattcactatcagaaaaggtttacaagtattataggaaaaacaaagtaactataataaaacaaactacacaatattcgactgatttcacgaagtgcgttaatttgatctctctacacttcaattcaccagaatttcgttctttaatatcgaataaagacaatcttcagtcaaatcatggaattgaactggaaaagggtattcacacattatacaatactatgaccgagtccttggttttctcgaaagtgactccaattagtctattagcactaggaggaattggtggtagatttgatcagacggttcactcaataacgcaattgtataccttatccgagaatgcaagctatttcaagctttgttacatgactccaacagacttaatattcttaatcaaaaaaaatggaactttgattgagtatgatccccaatttaggaacacttgtataggaaattgtgggttgttgcctattggagaggctactttggttaaggaaacccgtggtttaaagtgggatgttaaaaactggccaactagcgtggtcaccggaagagtcagcagtagtaacagatttgttggggataattgttgtttcattgataccaaagatgacatcattttgaatgtagaaatattcgttgataaattaatagattttttgtaa

SEQ ID NO: 10408 - DNA, 960 bp, Artificial Sequence
  Description of Artificial Sequence: Synthetic polynucleotide
atgagcgaggagtgtattgaaaatcctgaacgtattaaaattggtactgatttaatcaacatcagaaataaaatgaacttaaaagaattgatccatccaaacgaggatgaaaactctacccttctcatacttaatcaaaaaattgacattcctagaccgttgttttacaaaatttggaagttgcatgacttgaaggtctgtgcagatggtgcagccaatagattatatgactacttggatgatgacgaaaccttaaggataaaatatcttcccaattatattattggcgatttggattctttatctgaaaaggtttacaagtattataggaaaaacaaagtaactataataaaacaaactacacaatattctactgatttcacgaagtgcgttaatttgatctctttacacttcaattctccagaatttcgttctttaatatccaataaagacaatcttcagtctaatcatggaattgaattggaaaagggtattcacacattatacaatactatgaccgagtccttggttttctccaaagtgactccaattagtttgttagcattgggaggaattggtggtagatttgatcagacggttcactccataacgcaattgtataccttatccgagaatgcaagctatttcaagctttgttacatgactccaacagacttaatattcttaatcaaaaaaaatggaactttgattgagtatgatccccaatttaggaacacttgtataggaaattgtgggttgttgcctattggagaggctactttggttaaggaaacccgtggtttaaagtgggatgttaaaaactggccaactagcgtggtcaccggaagagtcagcagtagtaacagatttgttggggataattgttgtttcattgataccaaagatgacatcattttgaatgtagaaatattcgttgataaattaatagattttttgtga

SEQ ID NO: 10409 - DNA, 2376 bp, Saccharomyces cerevisiae
atgaaaaggcacgtgtctttatctgatatattgacaggaaataagagaaaagtgagaagacaagatgctctacagattaccatcgatgacgaaaatgatactgaatcaggcacttttgacgccagaacagccaaacatgacgattcttcagtaatatttttaaaccactctgttgtgaagccaattgaagctgtttctactaatcacaaatctgcaaaggagtttttgatgacgaaacgcacaaaagaaaaatgcgatgacgacgatgatgatcttattgtaatcagtgataagagtcccaaaagtgagactaattgtagcaaaattgcactttcgcaggagcatgaagatgatatttctataatttccacatcgagaatcaaatcatcgcttcttaatgaaagagcatcaaagattaaaaacttccttaaacatgagacaaccgacacgttcaaaagattaaatagcatctctaaactaaatgaaatagagccaccattaccattacatcaatcgattttcccagtaggtgacaaagagctgtcagatcggagtgttgatatcccgcttcctttccgcacaataccgccattaaatcataattttcttcctagtgactatgaatcgttgaaagacaagaattcagcatcttgtattcctgttcgctatcaagcaccggtattacttggcacaaatattaaaagaaatacaactctcacatggccgcagctattcaagcctgtcactttaaaacaagtattaattgaacccaaattgaaacttcgaatcaaaaattggattgaaacatcctttcatacgctagaaaagcctaccttgaggaaccgtctattgaacagaataaatcccaataaacaacagggatctggtgatgagcttgccaacttcattgtacctgatctcgaagaagacgaaaacttgcgtccagatttctacagaaatggcgaagcaaatagcagcttgagcgaatttgttccactaatgatattacacggaaattcaataggcaagaaaacgctgatacagacaatcatgagagagattgctggcgacgataattcttaccagatatatgaagttaattcaaacatgaacaggagcaaaaaagatttgcttgatatcctactagattttaccaccacacactatgtcaaagattcctcaaaaaggaaaagtgactacgggcttgttttatttaatgatgttgatgttttatttaaagaacatgataggggatattgggcaatgatcagcaagctttgtgaattttcacgaaggcccctcgtattgacttgtaaggatttgtcactagttcctagtgaacttattgccttggcaagtgaacaaaactctttgtttcatactaagaaaattagtacatccacagtctatgcgtttctaacaaaatatttaaagtcccttgaaatcgaagtttgtgacgactggcttcgcgatgttgtaaaacaaaataatgcggatattaggaagtgcttgatgcacttgcagttttggtgcgttgatactgaggctgatttgatttcatccaagaacagactaccggtcctaacatcaactcttggttcaagcgttaaagatatatcgcaattaactgatctactctccataaatgatgttattggtcaagcaacgctcaatcgttccatggttagacaagaaatagattctaccacaatgaccccagaaaaagttaatactttccaggatcaaaatctggatgatgaaatgaaactaaaatttgattacgtgatagattataaattgcatttaaatgaccccaatagacaaccgttattaccgtttgaattgaatatttaccaacacatccaagaacaattggaagctcggtattcctatgttagagaagcaaaccataggcttgataacgaataccttgttaacaggttcaaaaaaatgacagaatctacattaaattttttggcgtcaagaataccgaagtatgaccatcttcagtcggcaagaaggacgagaaattcgaagaaaatttctgatattttgaaccaattcaaaggaatttataatgatgaaactctgaacgaaaatgccgagattgatctgctgagcgccacaactcaacaaattaaagcggagatcaatcccttcgtttttgaaatcgctaaaagtgacgccaatgtcaagaatgaaaacaaacaaatatttgagttgcatagtgaaaatgtatcagaaagacgatacaaagatttggtctatcagttgtcacaagagggtgtcttgaaaaacgtatggttcaacgctgatccgagcatagtcgtgagaaaatgggagcatttgcactcaggcttttcaaagaacaaataa

SEQ ID NO: 10410 - DNA, 2376 bp, Artificial Sequence
  Description of Artificial Sequence: Synthetic polynucleotide
atgaaaaggcacgtgtctttatctgatatattgacaggaaataagagaaaagtgagaagacaagatgctttacagattaccatcgatgacgaaaatgatactgaaagtggcacttttgacgccagaacagccaaacatgacgattcttctgtaatatttttaaaccactctgttgtgaagccaattgaagctgtttctactaatcacaaatctgcaaaggagtttttgatgacgaaacgcacaaaagaaaaatgcgatgacgacgatgatgatcttattgtaatcagtgataagagtcccaaaagtgagactaattgtagcaaaattgcactttctcaggagcatgaagatgatatttctataatttccacatctagaatcaaaagctctcttcttaatgaaagagcatccaagattaaaaacttccttaaacatgagacaaccgacacgttcaaaagattaaatagcatctctaaattgaatgaaatagagccaccattaccattacatcaatctattttcccagtaggtgacaaagagttaagtgatagaagtgttgatatcccgcttcctttccgcacaataccgccattaaatcataattttcttcctagtgactatgaatctttgaaagacaagaattctgcatcttgtattcctgttcgctatcaagcaccggtattacttggcacaaatattaaaagaaatacaactctcacatggccgcagttattcaagcctgtcactttaaaacaagtattaattgaacccaaattgaaacttcgtatcaaaaattggattgaaacatcctttcatacgttagaaaagcctaccttgaggaaccgtttattgaacagaataaatcccaataaacaacagggatctggtgatgagcttgccaacttcattgtacctgatctcgaagaagacgaaaacttgcgtccagatttctacagaaatggcgaagcaaatagcagcttgagcgaatttgttccattaatgatattacacggaaattctataggcaagaaaacgttgatacagacaatcatgagagagattgctggcgacgataattcttaccagatatatgaagttaatagcaacatgaacaggagcaaaaaagatttgcttgatatcttattagattttaccaccacacactatgtcaaagattcctctaaaaggaaaagtgactacgggcttgttttatttaatgatgttgatgttttatttaaagaacatgataggggatattgggcaatgatcagcaagctttgtgaattttctagaaggcccctcgtattgacttgtaaggatttgtccttggttcctagtgaacttattgccttggcaagtgaacaaaactctttgtttcatactaagaaaattagtacatccacagtctatgcgtttttaacaaaatatttaaagtcccttgaaatcgaagtttgtgacgactggcttcgcgatgttgtaaaacaaaataatgcggatattaggaagtgcttgatgcacttgcagttttggtgcgttgatactgaggctgatttgatttcttccaagaacagattaccggtcttaacatctactcttggttccagcgttaaagatatatctcaattaactgatttactctccataaatgatgttattggtcaagcaacgctcaatcgttccatggttagacaagaaatagattctaccacaatgaccccagaaaaagttaatactttccaggatcaaaatttggatgatgaaatgaaattgaaatttgattacgtgatagattataaattgcatttaaatgaccccaatagacaaccgttattaccgtttgaattgaatatttaccaacacatccaagaacaattggaagctcgttattcctatgttagagaagcaaaccataggcttgataacgaataccttgttaacaggttcaaaaaaatgacagaatctacattaaattttttggcgtccagaataccgaagtatgaccatcttcagtctgcaagaaggacgagaaattctaagaaaatttctgatattttgaaccaattcaaaggaatttataatgatgaaactttgaacgaaaatgccgagattgatttattaagcgccacaactcaacaaattaaagcggagatcaatcccttcgtttttgaaatcgctaaaagtgacgccaatgtcaagaatgaaaacaaacaaatatttgagttgcatagtgaaaatgtatctgaaagaagatacaaagatttggtctatcagttgtctcaagagggtgtcttgaaaaacgtatggttcaacgctgatccgagcatagtcgtgagaaaatgggagcatttgcactctggcttttccaagaacaaatga

SEQ ID NO: 10411 - DNA, 825 bp, Saccharomyces cerevisiae
atggttgcgcctactgctttgaaaaaggctactgtgacacctgtaagtggacaagatgggggcagtagtagaattataggaataaataataccgaaagcatcgatgaggacgatgatgacgacgttctgttagatgattccgacaataacacagcaaaagaagaggtagagggcgaagaaggtagccggaaaacgcacgaatctaagaccgtagtggttgatgaccaggggaaacctcgcttcacttcagctagcaaaacacagggtaacaaaataaaatttgaatcgagaaagatcatggttccaccacacagaatgacacccttgaggaacagttggacaaaaatttatcctcctttggtcgagcacttgaagctgcaagtcagaatgaatttaaagaccaaatccgtagaactaagaacgaatcctaaatttaccacagaccctggtgcgttgcaaaaaggggccgattttatcaaagcctttaccttagggtttgatcttgacgattctatcgcactattgaggctagatgatttatatattgagacttttgaagtcaaagatgtcaagactctaacaggtgaccatttgtcgagagccatcggtcgtattgccggtaaagacggtaaaacgaaatttgcgattgaaaacgctacaagaacaagaattgtcttagctgactctaaaatccacattttgggcgggttcacccacatcagaatggcaagagaatctgtggttagtttaattttgggttcccctccaggtaaagtttatgggaacttacgtaccgttgcatctagattaaaagaacgctactaa

SEQ ID NO: 10412 - DNA, 825 bp, Artificial Sequence
  Description of Artificial Sequence: Synthetic polynucleotide
atggttgcgcctactgctttgaaaaaggctactgtgacacctgtaagtggacaagatgggggcagtagtagaattataggaataaataataccgaaagcatcgatgaggacgatgatgacgacgttttattagatgattccgacaataacacagcaaaagaagaggtagagggcgaagaaggtagcagaaaaacgcacgaatctaagaccgtagtggttgatgaccaggggaaacctcgcttcactagtgctagcaaaacacagggtaacaaaataaaatttgaatctagaaagatcatggttccaccacacagaatgacacccttgaggaacagttggacaaaaatttatcctcctttggtcgagcacttgaagttacaagtcagaatgaatttaaagaccaaatccgtagaattgagaacgaatcctaaatttaccacagaccctggtgcgttgcaaaaaggggccgattttatcaaagcctttaccttagggtttgatcttgacgattctatcgcattattgaggttagatgatttatatattgagacttttgaagtcaaagatgtcaagactttgacaggtgaccatttgtccagagccatcggtcgtattgccggtaaagacggtaaaacgaaatttgcgattgaaaacgctacaagaacaagaattgtcttagctgactctaaaatccacattttgggcgggttcacccacatcagaatggcaagagaatctgtggttagtttaattttgggttcccctccaggtaaagtttatgggaacttacgtaccgttgcatctagattaaaagaacgctactga

SEQ ID NO: 10413 - DNA, 1869 bp, Saccharomyces cerevisiae
atgctaatcacacgtttacgggtccctacaataaagcggccactgcttccaattacaagtcatctcgtaagacactgtattcgaacttacgtcgcaactaatcatggaaatgtcagaccttttataacaccttacaagagttcgttacctgttagatgtttgatcgcccaaaggcacatccgaacatttccaagcaatgacaagttcactaccaaggcttccaatattgagactattttgctgagaaaaaataatgagcgagagttcaagcaatcgcttctagcagatgcaaagaattttcaagaaaggttcaaaatcaatctaaagtggattcttattaaaaacaacaggccgttctctctgaatgaaataagtattatagcgtcttggctgatattgtcacaaattctatggctcattctgagcaccaccactttcatttcgttctatctattcgtcattaactctgttttcagtcaggaatacatccatgagaagaaaatctatgaaaggcttctaaaatggttgttgaaagatcataagtgctccaatcaagatttggaaatcacattttctccggaagataaagcatcaatgcttgtgctctctccagactgggagtcaaattcaatacttataaaaaggctaaatgtcagggatgagattttggacttagacttaaaatttcaccacattaacctgaatgtttccctaaaaaattggttacttggcaggggactaattacaaatgtttcaatatacggtattagaggatgtttgaacttatccaatttcatcaatttagtaaactcttttcaaggagatcaaaagacggagaattttttgaaaactttaaataacgttgaaattactgactcagaaattcttttgaaacaatctctgagtgcccaggaaactccgagtctaaaattttccatttacaatctatctttaccacgactaagactgaaccattttatttctgatattctgagtgccaaaacattttctggttcaattaataattctcttttcaacttatttaagaggcaacaaaagttaacagcagttattgaaaataataacaaaaataggatggcaagctcgaagtttgatttcacggacaacaatcaggaaaattaccgcacagtgactcatcaggatgatccgaattatgtaacgacgttaagattgaactttatcaacattaatgatttaaaatttaatggcgatggtaagttcaactggttgaaagacggccaagttgaaatacttgctgacataatgctaacaaattctacttctcatctatcatcggagtcgaaatatgcagtggtggatttgaaggtaacttgtagggacttgaagacaactttccctcaggaacctccagtattatcgacaggtgacagtattgtttcattggatgaattgaaacctataataacatttattaactcatatgaagggatggctaatcctatattgaaagatttctcggaaaacgagagattgaccaattccataatctggaactcgccaaatgtatcgattaataggcaaaggaaatcttatcctttaactacaaaagtcacttccaattccacgaaggaaatcatcaagtttcataatcaaccaaatactaatgcaaacgaaattgttttacgctgtaagatggtcaaaaacttgtcagatttacagcttattaacattaatcaaatactagaccaaattaccatggagctatatgttgatttaaccaaaatagtagaagattgggagtttaaaaacaaaaatgattggatgaaacaatggggtactacctttgcatcccaattattgttgtttgggtttggtgccatggtttga

SEQ ID NO: 10414 - DNA, 1869 bp, Artificial Sequence
  Description of Artificial Sequence: Synthetic polynucleotide
atgttgatcacacgtttaagagtccctacaataaagagaccattacttccaattacaagtcatctcgtaagacactgtattagaacttacgtcgcaactaatcatggaaatgtcagaccttttataacaccttacaagagttctttacctgttagatgtttgatcgcccaaaggcacatcagaacatttccaagcaatgacaagttcactaccaaggcttccaatattgagactattttgttaagaaaaaataatgagagagagttcaagcaatctcttttagcagatgcaaagaattttcaagaaaggttcaaaatcaatttgaagtggattcttattaaaaacaacaggccgttctctttgaatgaaataagtattatagcgtcttggttgatattgtctcaaattttatggctcattttgagcaccaccactttcatttctttctatcttttcgtcattaactctgttttcagtcaggaatacatccatgagaagaaaatctatgaaaggcttttgaaatggttgttgaaagatcataagtgctccaatcaagatttggaaatcacattttctccggaagataaagcatctatgcttgtgctctctccagactgggagagcaattctatacttataaaaaggttgaatgtcagggatgagattttggacttagacttaaaatttcaccacattaacttgaatgtttccttgaaaaattggttacttggcaggggattgattacaaatgtttctatatacggtattagaggatgtttgaacttatccaatttcatcaatttagtaaactcttttcaaggagatcaaaagacggagaattttttgaaaactttaaataacgttgaaattactgactctgaaattcttttgaaacaatctttgagtgcccaggaaactccgagtttgaaattttccatttacaatttatctttaccaagattgagattgaaccattttatttctgatattttaagtgccaaaacattttctggttccattaataattctcttttcaacttatttaagaggcaacaaaagttaacagcagttattgaaaataataacaaaaataggatggcaagctctaagtttgatttcacggacaacaatcaggaaaattaccgcacagtgactcatcaggatgatccgaattatgtaacgacgttaagattgaactttatcaacattaatgatttaaaatttaatggcgatggtaagttcaactggttgaaagacggccaagttgaaatacttgctgacataatgttaacaaattctacttctcatttatcttctgagagtaaatatgcagtggtggatttgaaggtaacttgtagggacttgaagacaactttccctcaggaacctccagtattatctacaggtgacagtattgtttctttggatgaattgaaacctataataacatttattaacagttatgaagggatggctaatcctatattgaaagatttctctgaaaacgagagattgaccaattccataatctggaactctccaaatgtatctattaataggcaaaggaaatcttatcctttaactacaaaagtcacttccaattccacgaaggaaatcatcaagtttcataatcaaccaaatactaatgcaaacgaaattgttttacgctgtaagatggtcaaaaacttgagtgatttacagcttattaacattaatcaaatattggaccaaattaccatggagttgtatgttgatttaaccaaaatagtagaagattgggagtttaaaaacaaaaatgattggatgaaacaatggggtactacctttgcatcccaattattgttgtttgggtttggtgccatggtttga

SEQ ID NO: 10415 - DNA, 558 bp, Saccharomyces cerevisiae
atgagcaagttttcacttaagttggggagtaagaccttgaaaaaaaatatttccaagaagacgaaaaaaaaaaactcattacagaaggccaacttattcgattgggatgatgcggaaactgcaagcctttcgcataaacctcaaagtaagataaagattcaaagtattgataaattcgatcttgatgaagaatcatcttctaagaagaaattagtgatcaagctgagtgaaaatgcggataccaaaaaaaacgatgctcctctggtggaatatgtcaccgaaaaagaatataatgaggtacctgtcgaggaatttggagatgctttacttcggggtatggggtgggaaagtgactccgagcaagattctaaaggcgacaagacacagagtcgaaacaaggacgtttcaaatgtttcacagatacatcctgatggactgggaattggtgccaagttaaataaggcaataaacgtggaggaggcttcatttatgcccgtcgtaaaaatcgataaaataacgggcactaaagttgatgacgacaaaaaaaataagtcatga

SEQ ID NO: 10416 - DNA, 558 bp, Artificial Sequence
  Description of Artificial Sequence: Synthetic polynucleotide
atgagcaagttttcccttaagttggggagtaagaccttgaaaaaaaatatttccaagaagacgaaaaaaaaaaactctttacagaaggccaacttattcgattgggatgatgcggaaactgcaagcctttctcataaacctcaaagtaagataaagattcaaagtattgataaattcgatcttgatgaagaaagctcttctaagaagaaattagtgatcaagttgagtgaaaatgcggataccaaaaaaaacgatgctcctttagtggaatatgtcaccgaaaaagaatataatgaggtacctgtcgaggaatttggagatgctttacttcgtggtatggggtgggaaagtgactccgagcaagattctaaaggcgacaagacacagagtagaaacaaggacgtttctaatgtttctcagatacatcctgatggacttggaattggtgccaagttaaataaggcaataaacgtggaggaggcttcttttatgcccgtcgtaaaaatcgataaaataacgggcactaaagttgatgacgacaaaaaaaataagtcttga

SEQ ID NO: 10417 - DNA, 1551 bp, Saccharomyces cerevisiae
atgatgaggtatcaatggtggctttatttagtatatgccatcggcctaatgctatgcctaggcccgtcgtatattcatccagatgaacatttccaatgcatcgagattttggctatgcagttcatgaaggtcaaaggtaccatcccatgggaatttaaatcaaaatttgctgctaggagttacggccccctattattggtttacgggcctttgttcactattttagaatcttttcccgaaattcaggacaacccagcgttaattctgtattcgatgagactacaaaactatgtgatgtacctattgtgctatcattttttaatacctaaattaataagggatgagagaaaggccgtacaattcatcaaaaaaagtctacttttaacttcttacgtaacctggacgtaccaaacacacacgttttccaattccatagaaacgctggctttaatctcaactttaactgtaatggaagatatggtaaacgaaaaaaatattcaaagaagtaatttcaaaaattcggttatattgggacttatatttagttttggtgtttttaatagagttacttttcctgcatttattttcttaccatgtttgatattattctggaagttttaccgggtccattggaaatccttttctttacttttactttcattttcattttcctcgtgtctatttgttcttattgatacaaatatttataacaacggaaagggatttgtcattacgcccttgaataacctgaaatacaacctcaatgtccaaaatttgcaagtacatggattacatccaagatacacccatctgctggtcaatttacctcaaatagttggcccagtattgctgctagcgattttttccggttacaaactcgataaattatctacttacgcaatcatatctggcctgctttttctttcattctttcaacatcaagaattaagattccttgtaccgctagtgccactactcgtgacaaacttaaactggacacctctgagttccacgttagtaaacaagaaaattttcaagggaacttggcttctttttaacataatcatggcgttcatcatgggaatttcacatcaagcaggaattatccaatttttgggagattacttccactttcgtaccgaacaaatgggcgttcacatatggtggaaaacatactcaccacccacctggatgtatatgagcaataacctaaccgtttcttctcttatcaatacacaggatggtattgagtcgatagatgaagtggcattcagtgtaggtaaccatcatgtaatagaccttaaaggctgtgatttaccacttttaacagaaacaattaggcggctgcgtttaaacgggtccataactccactaactttagtaactcccaattccatgacatcagaattgaaaaagttgaagagagatggcactattaacttaatacccaaaagaaattacttgttccatttggatttggatcatcttgatttcaatgatttcacgacttttaagccagggctaacagtgtactccatcgaactactataa

SEQ ID NO: 10418 - DNA, 1551 bp, Artificial Sequence
  Description of Artificial Sequence: Synthetic polynucleotide
atgatgaggtatcaatggtggctttatttagtatatgccatcggcttaatgttgtgcttgggcccgagctatattcatccagatgaacatttccaatgcatcgagattttggctatgcagttcatgaaggtcaaaggtaccatcccatgggaatttaaatctaaatttgctgctaggagttacggccccttattattggtttacgggcctttgttcactattttagaatcttttcccgaaattcaggacaacccagcgttaattctttattccatgagattacaaaactatgtgatgtacttgttgtgctatcattttttaatacctaaattaataagggatgagagaaaggccgtacaattcatcaaaaaaagtttacttttaacttcttacgtaacctggacgtaccaaacacacacgttttccaattccatagaaacgttggctttaatctctactttaactgtaatggaagatatggtaaacgaaaaaaatattcaaagaagtaatttcaaaaattctgttatattgggacttatatttagttttggtgtttttaatagagttacttttcctgcatttattttcttaccatgtttgatattattctggaagttttacagagtccattggaaatccttttctttacttttactttctttttctttttcctcttgtttatttgttcttattgatacaaatatttataacaacggaaagggatttgtcattacgcccttgaataacttgaaatacaacctcaatgtccaaaatttgcaagtacatggattacatccaagatacacccatttattggtcaatttacctcaaatagttggcccagtattgttattggcgattttttccggttacaaactcgataaattatctacttacgcaatcatatctggccttctttttctttctttctttcaacatcaagaattaagattccttgtaccgttggtgccattgctcgtgacaaacttaaactggacacctttgagttccacgttagtaaacaagaaaattttcaagggaacttggcttctttttaacataatcatggcgttcatcatgggaatttctcatcaagcaggaattatccaatttttgggagattacttccactttcgtaccgaacaaatgggcgttcacatatggtggaaaacatactctccacccacctggatgtatatgagcaataacttgaccgtttcttctcttatcaatacacaggatggtattgagagtatagatgaagtggcattcagtgtaggtaaccatcatgtaatagaccttaaaggctgtgatttaccacttttaacagaaacaattaggaggttacgtttaaacgggtccataactccattgactttagtaactcccaattccatgacaagtgaattgaaaaagttgaagagagatggcactattaacttaatacccaaaagaaattacttgttccatttggatttggatcatcttgatttcaatgatttcacgacttttaagccagggttgacagtgtactccatcgaattattatga

SEQ ID NO: 10419 - DNA, 492 bp, Saccharomyces cerevisiae
atgtcgcagaagattggacacagtggcttggcttttgcgcgcctttggcaccatgtcgacgttgcccgtgataagaggacattgggtagattggcttcagcaattgcaattaccttaattggtagacataagccggtctatcatccgtcacaagactgtggagactacgtagtagtgactaattgccaaaaaatccgtgtaacaggtaagaaatttgagcagaagacttactggtctcattcaggtagacctggtcagctaaagttacagacaatgaacaaggttgttgccgataaaggatttggagaaattttgaaaaaagcagttagcggtatgttgcctaaaaataaattgagaaagcaacggttagaccgcttaaaagttttcgatggaagtgaaaacccttataaacaaaatattactgcctttgcccatgagcaatcatcaataccagagcctcttaaagaatcaatttttaaccaattgaaatag

SEQ ID NO: 10420 - DNA, 492 bp, Artificial Sequence
  Description of Artificial Sequence: Synthetic polynucleotide
atgtctcagaagattggacacagtggcttggcttttgcgcgcctttggcaccatgtcgacgttgcccgtgataagaggacattgggtagattggcttctgcaattgcaattaccttaattggtagacataagccggtctatcatccgtctcaagactgtggagactacgtagtagtgactaattgccaaaaaatccgtgtaacaggtaagaaatttgagcagaagacttactggtctcattctggtagacctggtcagttgaagttacagacaatgaacaaggttgttgccgataaaggatttggagaaattttgaaaaaagcagttagcggtatgttgcctaaaaataaattgagaaagcaaagattagaccgcttaaaagttttcgatggaagtgaaaacccttataaacaaaatattactgcctttgcccatgagcaatcttctataccagagcctcttaaagaaagtatttttaaccaattgaaatga

SEQ ID NO: 10421 - DNA, 3675 bp, Saccharomyces cerevisiae
atgtcagaccttgcaaactcagaaaagtattatgatgaggacccatatggattcgaggatgaaagtgcaccaattactgcagaagattcgtgggctgttatatccgctttttttcgcgagaaggggctagtttcacaacaacttgactctttcaatcaattcgttgattatactttacaagacattatttgcgaggattccaccttgattttagagcagttggctcaacatactaccgaatcagacaacatcagtagaaagtatgagattagttttggtaaaatctatgttacaaagccaatggtaaatgaatctgatggtgttacccatgcgttgtatccacaagaagcacgtttacgtaatttgacatattcgtctggtttatttgttgatgttaagaagagaacatatgaagctattgatgttccaggtagggaactgaaatatgaattaattgccgaagaatctgaagatgacagcgaaagcggaaaagttttcattggccgtttaccgattatgttaagatcaaagaattgttacctaagtgaggctacagaatcagatttatataagctgaaagaatgtccctttgatatgggtggttatttcatcattaatggttctgaaaaagttttgattgcacaggagcgttctgcaggtaatattgttcaagtgtttaaaaaagccgccccatctccaatttctcatgtagcagaaattagatctgcccttgaaaaaggttctaggtttatcagtacccttcaagtcaagctttatggtcgtgagggtagttcagctcgtactattaaagccacattaccatatatcaaacaggatattcctattgtaatcatattcagagctttaggtattattccagacggtgaaattttagaacatatctgctacgacgtaaatgattggcaaatgctggaaatgcttaagccttgtgttgaagacgggtttgttattcaagatcgtgaaactgcattagactttattggtcgtcgtggtactgcccttggtattaagaaagaaaaaagaatccaatatgcaaaagacattttacaaaaagaattcctacctcatattactcaattagaaggttttgaaagtagaaaggcatttttcttaggttatatgataaacagattattactgtgtgctttagatcgtaaagaccaagatgatcgtgatcatttcgggaaaaaaagattagatttggcaggtccattattggcccaacttttcaagacattgttcaaaaaattaactaaagatattttccgttatatgcaaagaactgtagaggaagcccatgactttaacatgaaattagcgattaacgcaaaaaccataacatcgggtcttaagtacgctttggctactggtaactggggtgaacaaaaaaaagccatgtcttctagggcaggtgtttctcaggttttgaaccgttacacttattcatccaccttatcacatttaagaagaacaaatacccctattggtcgtgatggtaaattagccaaaccacgtcaattgcataatacacattgggggttggtctgtcctgcagaaactcctgaaggccaagcgtgtggtttagttaagaatctgtcactgatgtcttgtatttctgttggtacagatccgatgcctatcatcacttttttgagtgaatggggtatggaaccactggaagattacgtaccacatcaatcacctgacgcgacaagggtcttcgtcaatggtgtttggcacggtgttcacagaaacccagcaagattaatggaaacccttagaacattgagaagaaagggtgatatcaatccggaagtttctatgattagagatattcgtgaaaaggagctaaaaatctttacagatgccggtagagtttatagaccattatttattgttgaagacgatgaatcactaggccataaggaattaaaggtaagaaagggtcatattgccaaactgatggctaccgaatatcaagatattgaaggtggatttgaagatgtagaagaatatacatggtcatcattattgaatgagggtttagtggaatacattgatgctgaagaagaagaatctatattgatcgcaatgcaaccggaagatctcgagcctgcagaggcaaatgaggaaaacgatctcgatgttgatcctgccaaacgtataagagtatcacatcatgctacaacatttacacattgtgagattcatccttctatgattctcggtgtcgcagcatccattattccattccctgaccataatcaatctccgcgtaacacttaccaatctgcgatgggtaagcaagctatgggtgtgtttttaacaaactataatgtgcgtatggatactatggccaatattctatattatcctcaaaaaccattgggtactacacgtgcgatggaatatttgaagtttagagaattacccgctggtcaaaatgcaattgttgctattgcatgttactccggttataatcaagaagattctatgattatgaaccagtcttcaattgatcgtggtctattcagatctctgtttttcagatcttatatggatcaggaaaagaagtacggtatgtctataacggagacttttgagaaaccacaacgtacaaacaccttaagaatgaaacatggtacatacgataagttggacgatgatggtctaattgcgcctggtgttagagtttcaggagaagatgtgattatcggtaaaaccacaccaatctcaccagatgaagaggaactcggtcaaagaacagcataccattccaaacgtgatgcttccacaccattgagaagtactgaaaacggtattgttgatcaagttttagtcacaacaaaccaagatgggttaaagtttgtcaaagttcgtgtaagaactacaaagattcctcaaattggtgacaaatttgcttctcgtcacggtcaaaagggtactattggtatcacatatcgtagagaagatatgccatttaccgcagaaggtattgttccagatttgattattaaccctcatgctattccatctcgtatgactgttgcccatttaattgaatgtttgttgagtaaagtcgcggcactatctggtaatgaaggtgacgcctctcctttcacggacattactgtagaaggtatatccaaactactgcgtgagcatggttatcaatctcgtgggtttgaagttatgtataatggtcacacaggtaaaaaactaatggctcaaattttctttggtcctacatattatcaacgactaagacacatggtggatgacaagatacatgccagagcacgtggtccaatgcaagtattgacgagacagcctgtagagggtagatcgagagacggtggtttaagattcggtgagatggaacgtgactgtatgattgctcatggtgctgcctcattcttgaaggagagattaatggaagcatccgatgcctttagagtccatatttgtggtatttgcgggctgatgacagttatcgcgaaattaaatcataaccaatttgaatgtaagggatgtgataataagattgatatttaccaaattcatattccatacgccgcgaagttattattccaagaacttatggctatgaacattacaccacgtttatataccgatcgttcgagagatttttaa

SEQ ID NO: 10422 - DNA, 3675 bp, Artificial Sequence
  Description of Artificial Sequence: Synthetic polynucleotide
atgtctgaccttgcaaactctgaaaagtattatgatgaggacccatatggattcgaggatgaaagtgcaccaattactgcagaagattcttgggctgttatatccgctttttttcgcgagaaggggttggtttctcaacaacttgactctttcaatcaattcgttgattatactttacaagacattatttgcgaggattccaccttgattttagagcagttggctcaacatactaccgaaagtgacaacatcagtagaaagtatgagattagttttggtaaaatctatgttacaaagccaatggtaaatgaatctgatggtgttacccatgcgttgtatccacaagaagcacgtttacgtaatttgacatattcttctggtttatttgttgatgttaagaagagaacatatgaagctattgatgttccaggtagggaattgaaatatgaattaattgccgaagaatctgaagatgacagcgaaagcggaaaagttttcattggccgtttaccgattatgttaagatccaagaattgttacttgagtgaggctacagaaagtgatttatataagttgaaagaatgtccctttgatatgggtggttatttcatcattaatggttctgaaaaagttttgattgcacaggagcgttctgcaggtaatattgttcaagtgtttaaaaaagccgccccatctccaatttctcatgtagcagaaattagatctgcccttgaaaaaggttctaggtttatcagtacccttcaagtcaagctttatggtcgtgagggtagttctgctcgtactattaaagccacattaccatatatcaaacaggatattcctattgtaatcatattcagagctttaggtattattccagacggtgaaattttagaacatatctgctacgacgtaaatgattggcaaatgttggaaatgcttaagccttgtgttgaagacgggtttgttattcaagatcgtgaaactgcattagactttattggtcgtcgtggtactgcccttggtattaagaaagaaaaaagaatccaatatgcaaaagacattttacaaaaagaattcttacctcatattactcaattagaaggttttgaaagtagaaaggcatttttcttaggttatatgataaacagattattattatgtgctttagatcgtaaagaccaagatgatcgtgatcatttcgggaaaaaaagattagatttggcaggtccattattggcccaacttttcaagacattgttcaaaaaattaactaaagatattttccgttatatgcaaagaactgtagaggaagcccatgactttaacatgaaattagcgattaacgcaaaaaccataacatctggtcttaagtacgctttggctactggtaactggggtgaacaaaaaaaagccatgtcttctagggcaggtgtttctcaggttttgaaccgttacacttattcttccaccttatctcatttaagaagaacaaatacccctattggtcgtgatggtaaattagccaaaccacgtcaattgcataatacacattgggggttggtctgtcctgcagaaactcctgaaggccaagcgtgtggtttagttaagaatttatctttgatgtcttgtatttctgttggtacagatccgatgcctatcatcacttttttgagtgaatggggtatggaaccattggaagattacgtaccacatcaaagtcctgacgcgacaagggtcttcgtcaatggtgtttggcacggtgttcacagaaacccagcaagattaatggaaacccttagaacattgagaagaaagggtgatatcaatccggaagtttctatgattagagatattcgtgaaaaggagttgaaaatctttacagatgccggtagagtttatagaccattatttattgttgaagacgatgaatctttaggccataaggaattaaaggtaagaaagggtcatattgccaaattaatggctaccgaatatcaagatattgaaggtggatttgaagatgtagaagaatatacatggtcttctttattgaatgagggtttagtggaatacattgatgctgaagaagaagaatctatattgatcgcaatgcaaccggaagatctcgagcctgcagaggcaaatgaggaaaacgatctcgatgttgatcctgccaaacgtataagagtatctcatcatgctacaacatttacacattgtgagattcatccttctatgattctcggtgtcgcagcatccattattccattccctgaccataatcaatctccgcgtaacacttaccaatctgcgatgggtaagcaagctatgggtgtgtttttaacaaactataatgtgcgtatggatactatggccaatattctttattatcctcaaaaaccattgggtactacacgtgcgatggaatatttgaagtttagagaattacccgctggtcaaaatgcaattgttgctattgcatgttactccggttataatcaagaagattctatgattatgaaccagtcttccattgatcgtggtcttttcagatctttatttttcagatcttatatggatcaggaaaagaagtacggtatgtctataacggagacttttgagaaaccacaacgtacaaacaccttaagaatgaaacatggtacatacgataagttggacgatgatggtttgattgcgcctggtgttagagtttctggagaagatgtgattatcggtaaaaccacaccaatctctccagatgaagaggaactcggtcaaagaacagcataccattccaaacgtgatgcttccacaccattgagaagtactgaaaacggtattgttgatcaagttttagtcacaacaaaccaagatgggttaaagtttgtcaaagttcgtgtaagaactacaaagattcctcaaattggtgacaaatttgcttctcgtcacggtcaaaagggtactattggtatcacatatcgtagagaagatatgccatttaccgcagaaggtattgttccagatttgattattaaccctcatgctattccatctcgtatgactgttgcccatttaattgaatgtttgttgagtaaagtcgcggcattatctggtaatgaaggtgacgcctctcctttcacggacattactgtagaaggtatatccaaattattacgtgagcatggttatcaatctcgtgggtttgaagttatgtataatggtcacacaggtaaaaaattaatggctcaaattttctttggtcctacatattatcaaagattgagacacatggtggatgacaagatacatgccagagcacgtggtccaatgcaagtattgacgagacagcctgtagagggtagatctagagacggtggtttaagattcggtgagatggaacgtgactgtatgattgctcatggtgctgcctctttcttgaaggagagattaatggaagcatccgatgcctttagagtccatatttgtggtatttgcgggttgatgacagttatcgcgaaattaaatcataaccaatttgaatgtaagggatgtgataataagattgatatttaccaaattcatattccatacgccgcgaagttattattccaagaacttatggctatgaacattacaccacgtttatataccgatcgttccagagatttttga

SEQ ID NO: 10423 - DNA, 771 bp, Saccharomyces cerevisiae
atgtttaatttaattttatggcccttatttttgcttacctcagttgccattcctttgcagctgacattagaagtggtctatctgacgtcttccgttgacttctcaaaggcaagtgctgctaaaaccgctacttctttgggtcagtccccagttgtcatcaccatttataaatcactgttaaaatattggagtctttacgagttcatacattttatttacctctatactcctattgatgcctttctgaatttcttaccatttacctctttacttatgtcgtttggaagtatttgcttgacaagagagctggtatatgacttcattgcctttatggaatctcaaaacaagcttaccggattccttaataagataacagaaccgaattttaacagttatttactgttttcttcaatttataacatttggtttgcagatgacaccaatgacaaattcttattcggtaaattaactcagattttaatatctgtaacaaaaaggtacgaatttccaagaacattctacttagcaaaagtttctgatttcctacaaaatctcattctaacgagattgagaccctttgtaacggagcaaccccaaggcgacaaaaatcgctatcaaaacggtgaccgtgaatctacaaagaatggagctgcttatcagaagtcttcacaacaatcatcgtctttcgaacaaaattttaccagcactgagttcccgaatgattatgattttatggaggatattctagatgagacaactgaattggattag

SEQ ID NO: 10424 - DNA, 771 bp, Artificial Sequence
  Description of Artificial Sequence: Synthetic polynucleotide
atgtttaatttaattttatggcccttatttttgcttacctctgttgccattcctttgcagttgacattagaagtggtctatttgacgtcttccgttgacttctccaaggcaagtgctgctaaaaccgctacttctttgggtcagtccccagttgtcatcaccatttataaatctttattaaaatattggagtctttacgagttcatacattttatttacctctatactcctattgatgcctttttgaatttcttaccatttacctctttacttatgagttttggaagtatttgcttgacaagagagttggtatatgacttcattgcctttatggaatctcaaaacaagcttaccggattccttaataagataacagaaccgaattttaacagttatttacttttttcttccatttataacatttggtttgcagatgacaccaatgacaaattcttattcggtaaattaactcagattttaatatctgtaacaaaaaggtacgaatttccaagaacattctacttagcaaaagtttctgatttcttacaaaatctcattttaacgagattgagaccctttgtaacggagcaaccccaaggcgacaaaaatcgctatcaaaacggtgaccgtgaatctacaaagaatggagctgcttatcagaagtcttctcaacaatcttcttctttcgaacaaaattttaccagcactgagttcccgaatgattatgattttatggaggatattttagatgagacaactgaattggattga

SEQ ID NO: 10425 - DNA, 4536 bp, Saccharomyces cerevisiae
atgcccgaggccaagcttaacaataacgtcaacgacgttactagctactcctccgcgtcttcttctactgaaaacgctgctgatctacacaattataatgggttcgatgagcatacagaagctcgaatccaaaaactggcaaggactctgaccgcacagagtatgcaaaactccactcaatcggcacccaacaaaagtgatgctcagtctatattttctagcggtgtggaaggtgtaaacccgatattctctgatcctgaagctccaggctatgacccaaaattggaccccaactccgaaaatttttctagtgccgcctgggttaagaatatggctcacctaagtgcggcagaccctgacttttataagccttattccttaggttgcgcttggaagaacttaagtgcttctggtgcttccgcagatgtcgcctatcagtcaactgtggttaatattccatacaaaatcctaaaaagtgggctgagaaagtttcaacgttctaaagaaaccaatactttccaaatcttgaaaccaatggatggttgcctaaacccaggtgaattgctagtcgttttaggtagaccaggctctggctgtactactttattaaaatccatctcttcaaatactcatggttttgatcttggtgcagatactaaaatttcttacagcggctactcaggtgatgatattaagaaacattttcgtggtgaagttgtttacaacgcagaagctgatgtacatctgcctcatttaacagtcttcgaaactttggttacagtagcgaggttgaaaaccccacagaaccgtatcaagggtgtcgatagggaaagttatgcgaatcatttggcggaagtagcaatggcaacgtacggtttatcgcatacaaggaatacaaaagttggtaacgacatcgtcagaggtgtttccggtggtgaaaggaagcgtgtctccattgctgaagtctccatctgtggatccaaatttcaatgctgggataatgctacaaggggtttggattccgctaccgctttggaatttattcgtgccttaaagactcaagctgatatttccaatacatctgccacagtggccatctatcaatgttctcaagatgcgtacgacttgttcaataaagtctgtgttttggatgatggttatcagatctactatggccccgccgataaggccaagaagtactttgaagatatggggtatgtttgtccaagcagacaaaccaccgcagattttttgacctcagttacaagtccctctgagagaaccctgaacaaagatatgctaaaaaaaggtattcatataccacagaccccgaaggaaatgaacgattactgggtaaaatctccaaattacaaagagctaatgaaagaagtcgaccaacgattattgaatgacgatgaagcaagccgtgaagctattaaggaagcccacattgctaagcagtccaagagagcaagaccttcctctccttatactgtcagctacatgatgcaagttaaatacctattaatcagaaatatgtggagactgcgaaataatatcgggtttacattatttatgattttgggtaactgtagtatggctttaatcttgggttcaatgtttttcaagatcatgaaaaagggtgatacttctacattctatttccgtggttctgctatgttttttgcaattctattcaatgcattttcttctctgttagaaatcttttcgttatatgaggccagaccaatcactgaaaaacatagaacatattcgttataccatccaagtgctgacgcttttgcatcagttctatcagaaataccctcaaagttaatcatcgctgtttgcttcaatataatcttctatttcttagtagactttagaagaaatggtggtgtattctttttctacttattaataaacattgtcgcggttttctccatgtctcacttgtttagatgtgttggttccttaacaaagacattgtcagaagctatggttcccgcttctatgttattgttggctctatccatgtataccggttttgctattcctaagaagaagatcctacgttggtctaaatggatttggtatatcaatccgttggcttacttattcgaatctttgttaattaacgagtttcatggtataaaattcccctgcgctgaatatgttcctcgtggtcctgcgtatgcaaacatttctagtacagaatctgtttgtaccgtggttggagctgttccaggccaagactatgttctgggtgatgatttcattagaggaacttatcaatactaccacaaagacaaatggcgtggtttcggtattggtatggcttatgtcgtcttctttttctttgtctatctattcttatgtgaatacaacgagggtgctaaacaaaaaggtgaaatattagttttcccacgcagtatagttaaaagaatgaagaaaagaggtgtactaactgaaaagaatgcaaatgaccccgaaaacgttggggaacgtagtgacttatccagcgataggaaaatgctacaagaaagctctgaagaggaatccgatacttacggagaaattggtttatccaagtcagaggctatatttcactggagaaacctttgttacgaagttcagattaaggccgaaacaagacgtattttgaacaatgttgatggttgggttaaaccaggtactttaacagctttaatgggtgcttcaggtgctggtaaaaccacacttctggattgtttggccgaaagggttaccatgggtgttataactggtgatatcttggtcaatggtattccccgtgataaatctttcccaagatccattggttattgtcagcaacaagatttgcatttgaaaactgccactgtgagggagtcattgagattttctgcttacctacgtcaaccagctgaagtttccattgaagaaaagaacagatatgttgaagaagttattaaaattcttgaaatggaaaaatatgctgatgctgttgttggtgttgctggtgaaggtttaaacgttgaacaaagaaaaagattaaccattggtgttgaattaactgccaaaccaaaactgttggtctttttagatgaacctacttctggtttggattctcaaactgcttggtctatttgtcagctaatgaaaaagttggcaaatcatggtcaagcaattctatgtactattcaccaaccctctgctattttgatgcaagaattcgatcgtttactatttatgcaacgtggtggtaagactgtctactttggcgacttgggcgaaggttgtaaaactatgatcgattattttgaaagccatggtgctcataaatgccctgctgacgccaacccagctgaatggatgctagaagttgttggtgcagctccaggctctcatgcaaatcaagattattacgaagtttggaggaattctgaagagtacagggccgttcaatctgaattagattggatggaaagagaattaccaaagaaaggttcgataactgcagctgaggacaaacacgaattttcacaatcaattatttatcaaacaaaattggtcagtattcgtctattccagcaatattggagatctccagattatttatggtcgaagtttattttaactattttcaatcaattgttcatcggtttcactttcttcaaagcaggaacctcgctacagggtttacaaaatcaaatgttggctgtgttcatgtttacggttattttcaatcctattctacaacaatacctaccatcttttgtccagcaaagagatttgtatgaggccagggaacgcccctcaaggactttttcttggatttcatttatcttcgctcaaatattcgtggaagttccatggaatatattggcaggtactattgcttattttatctactattatccaattggattttactccaacgcgtctgcagctggccagttgcatgaaaggggtgctttattttggttgttctcttgtgctttctacgtttatgttggttctatgggtctgcttgtcatttcattcaaccaagttgcagaaagtgcagctaacttagcctctttgttgtttacaatgtctttgtctttttgtggtgttatgactaccccaagtgccatgcctagattttggatattcatgtacagggtttcacctttgacttatttcattcaggctctgttggctgttggtgttgctaacgtagacgtcaaatgcgctgattacgaattgctagaattcacaccaccatccggtatgacatgtgggcagtacatggaaccatatttacaactagcaaagactggttacttaactgatgaaaatgccactgacacctgtagtttctgtcaaatatctacaaccaatgattacttagctaatgtcaattctttctacagtgagagatggagaaattatggtatcttcatctgttatattgcattcaattatatcgctggtgtctttttctactggttagcaagagtgcctaaaaagaacggtaaactctccaagaaataa

SEQ ID NO: 10426 - DNA, 4536 bp, Artificial Sequence
  Description of Artificial Sequence: Synthetic polynucleotide
atgcccgaggccaagcttaacaataacgtcaacgacgttactagctactcctccgcgtcttcttctactgaaaacgctgctgatttacacaattataatgggttcgatgagcatacagaagctagaatccaaaaattggcaaggactttgaccgcacagagtatgcaaaactccactcaaagtgcacccaacaaaagtgatgctcagtctatattttctagcggtgtggaaggtgtaaacccgatattctctgatcctgaagctccaggctatgacccaaaattggaccccaactccgaaaatttttctagtgccgcctgggttaagaatatggctcacttaagtgcggcagaccctgacttttataagccttattccttaggttgcgcttggaagaacttaagtgcttctggtgcttccgcagatgtcgcctatcagtctactgtggttaatattccatacaaaatcttgaaaagtgggttgagaaagtttcaacgttctaaagaaaccaatactttccaaatcttgaaaccaatggatggttgcttgaacccaggtgaattgttggtcgttttaggtagaccaggctctggctgtactactttattaaaatccatctcttccaatactcatggttttgatcttggtgcagatactaaaatttcttacagcggctactctggtgatgatattaagaaacattttcgtggtgaagttgtttacaacgcagaagctgatgtacatttacctcatttaacagtcttcgaaactttggttacagtagcgaggttgaaaaccccacagaaccgtatcaagggtgtcgatagggaaagttatgcgaatcatttggcggaagtagcaatggcaacgtacggtttatctcatacaaggaatacaaaagttggtaacgacatcgtcagaggtgtttccggtggtgaaaggaagcgtgtctccattgctgaagtctccatctgtggatccaaatttcaatgctgggataatgctacaaggggtttggattccgctaccgctttggaatttattcgtgccttaaagactcaagctgatatttccaatacatctgccacagtggccatctatcaatgttctcaagatgcgtacgacttgttcaataaagtctgtgttttggatgatggttatcagatctactatggccccgccgataaggccaagaagtactttgaagatatggggtatgtttgtccaagcagacaaaccaccgcagattttttgacctctgttacaagtccctctgagagaaccttgaacaaagatatgttgaaaaaaggtattcatataccacagaccccgaaggaaatgaacgattactgggtaaaatctccaaattacaaagagttgatgaaagaagtcgaccaaagattattgaatgacgatgaagcaagccgtgaagctattaaggaagcccacattgctaagcagtccaagagagcaagaccttcctctccttatactgtcagctacatgatgcaagttaaatacttattaatcagaaatatgtggagattaagaaataatatcgggtttacattatttatgattttgggtaactgtagtatggctttaatcttgggttctatgtttttcaagatcatgaaaaagggtgatacttctacattctatttccgtggttctgctatgttttttgcaattcttttcaatgcattttcttctttattagaaatcttttctttatatgaggccagaccaatcactgaaaaacatagaacatattctttataccatccaagtgctgacgcttttgcatctgttttatctgaaataccctccaagttaatcatcgctgtttgcttcaatataatcttctatttcttagtagactttagaagaaatggtggtgtattctttttctacttattaataaacattgtcgcggttttctccatgtctcacttgtttagatgtgttggttccttaacaaagacattgagtgaagctatggttcccgcttctatgttattgttggctttgtccatgtataccggttttgctattcctaagaagaagatcttacgttggtctaaatggatttggtatatcaatccgttggcttacttattcgaatctttgttaattaacgagtttcatggtataaaattcccctgcgctgaatatgttcctcgtggtcctgcgtatgcaaacatttctagtacagaatctgtttgtaccgtggttggagctgttccaggccaagactatgttttaggtgatgatttcattagaggaacttatcaatactaccacaaagacaaatggcgtggtttcggtattggtatggcttatgtcgtcttctttttctttgtctatcttttcttatgtgaatacaacgagggtgctaaacaaaaaggtgaaatattagttttcccacgcagtatagttaaaagaatgaagaaaagaggtgtattgactgaaaagaatgcaaatgaccccgaaaacgttggggaacgtagtgacttatccagcgataggaaaatgttacaagaaagctctgaagaggaatccgatacttacggagaaattggtttatccaagagtgaggctatatttcactggagaaacctttgttacgaagttcagattaaggccgaaacaagacgtattttgaacaatgttgatggttgggttaaaccaggtactttaacagctttaatgggtgcttctggtgctggtaaaaccacacttttagattgtttggccgaaagggttaccatgggtgttataactggtgatatcttggtcaatggtattccccgtgataaatctttcccaagatccattggttattgtcagcaacaagatttgcatttgaaaactgccactgtgagggagtctttgagattttctgcttacttgcgtcaaccagctgaagtttccattgaagaaaagaacagatatgttgaagaagttattaaaattcttgaaatggaaaaatatgctgatgctgttgttggtgttgctggtgaaggtttaaacgttgaacaaagaaaaagattaaccattggtgttgaattaactgccaaaccaaaacttttggtctttttagatgaacctacttctggtttggattctcaaactgcttggtctatttgtcagttgatgaaaaagttggcaaatcatggtcaagcaattctttgtactattcaccaaccctctgctattttgatgcaagaattcgatcgtttactttttatgcaacgtggtggtaagactgtctactttggcgacttgggcgaaggttgtaaaactatgatcgattattttgaaagccatggtgctcataaatgccctgctgacgccaacccagctgaatggatgttggaagttgttggtgcagctccaggctctcatgcaaatcaagattattacgaagtttggaggaattctgaagagtacagggccgttcaatctgaattagattggatggaaagagaattaccaaagaaaggttccataactgcagctgaggacaaacacgaattttctcaatctattatttatcaaacaaaattggtcagtattcgtttattccagcaatattggagatctccagattatttatggtccaagtttattttaactattttcaatcaattgttcatcggtttcactttcttcaaagcaggaacctctttgcagggtttacaaaatcaaatgttggctgtgttcatgtttacggttattttcaatcctattttacaacaatacttgccatcttttgtccagcaaagagatttgtatgaggccagggaacgcccctctaggactttttcttggatttcctttatcttcgctcaaatattcgtggaagttccatggaatatattggcaggtactattgcttattttatctactattatccaattggattttactccaacgcgtctgcagctggccagttgcatgaaaggggtgctttattttggttgttctcttgtgctttctacgtttatgttggttctatgggtttacttgtcatttctttcaaccaagttgcagaaagtgcagctaacttagcctctttgttgtttacaatgtctttgtctttttgtggtgttatgactaccccaagtgccatgcctagattttggatattcatgtacagggtttctcctttgacttatttcattcaggctttattggctgttggtgttgctaacgtagacgtcaaatgcgctgattacgaattgttggaattcacaccaccatccggtatgacatgtgggcagtacatggaaccatatttacaattggcaaagactggttacttaactgatgaaaatgccactgacacctgtagtttctgtcaaatatctacaaccaatgattacttagctaatgtcaattctttctacagtgagagatggagaaattatggtatcttcatctgttatattgcattcaattatatcgctggtgtctttttctactggttagcaagagtgcctaaaaagaacggtaaactctccaagaaatga

SEQ ID NO: 10427 - DNA, 1764 bp, Saccharomyces cerevisiae
atggcgaaccgtcttctcatatacggccttattttgtgggtaagtataatcggatcttttgcattagataggaacaaaactgctcaaaatgcgaagattggtctacatgataccactgtgatcacgactggaagtacaacgaacgtgcagaaagaacattcctcaccactatccaccggttctttaagaacccatgattttagacaggcctctaaagttgacatacggcaggctgacatacgggaaaacggtgagaggaaagagcaagatgcactaacacagcctgcaacaccaaggaatccgggcgattcgagtaattcatttttatcgttcgacgaatggaagaaggtcaagtcgaaggagcactcatcaggccctgaacgtcatcttagtcgagtgagggagccagtcgatccctcttgctataaagagaaagaatgcataggagaagagttggaaatcgatttggggtttttgacaaacaaaaacgagtggagtgaaagagaagaaaatcaaaaaggattcaatgaggaaaaggacatagagaaagtttacaaaaaaaaattcaactatgcatccttggattgcgctgcaacaattgtcaaaagcaatccagaagcgattggagcgacttctacgttaattgagagcaaagacaagtatttactgaatccctgttcagctccgcagcaattcattgttatagagctttgtgaagatatcctggtggaggaaattgaaattgctaattacgaattcttttcctcgaccttcaagagatttagggtgtcagtttctgatagaataccgatggttaaaaatgaatggacaatattaggagaattcgaggcaagaaattcaagagaactacaaaagtttcaaatacataatccccaaatctgggcaagttatttgaaaatcgaaattctatcccattatgaggacgaattttattgtcccatatccttaatcaaagtatatggtaaatcaatgatggatgagtttaagatcgatcaactaaaggctcaagaggataaagaacaatccataggaactaacaatataaacaatttgaatgaacaaaatatccaagacagatgtaacaatatagaaacgcgtttagagactccaaacacaagcaatctctcagacttagctggtgcattatcatgtacttcaaagctcatccctttgaagttcgatgaatttttcaaggtgcttaatgcatccttttgtccttccaagcaaatgatatcttcttcttcttcttcggctgttcctgtaattccagaagaatccatttttaagaacatcatgaaaaggctgtcacaactggagacaaattctagtttgacagtttcttacattgaggaacagagcaaactgctatctaaatcgtttgaacaacttgaaatggcgcacgaagcaaagttcagtcatcttgtcacgatattcaacgaaacaatgatgagtaatctagatctgctgaataactttgccaatcaattgaaagatcaatctttacgtatattagaagaacagaaactggagaatgacaaatttactaaccgtcatttattgcatttggaaagattggaaaaagaagtcagttttcaaagaagaattgtttatgcgtcatttttcgccttcgtagggttgatatcctatctattaataacgagagagctttactttgaagatttcgaagagagcaaaaatggcgctattgaaaaggcagacattgttcaacaagcaatcagatga

SEQ ID NO: 10428 - DNA, 1764 bp, Artificial Sequence
  Description of Artificial Sequence: Synthetic polynucleotide
atggcgaaccgtcttctcatatacggccttattttgtgggtaagtataatcggatcttttgcattagataggaacaaaactgctcaaaatgcgaagattggtttgcatgataccactgtgatcacgactggaagtacaacgaacgtgcagaaagaacattcctctccattgtccaccggttctttaagaacccatgattttagacaggcctctaaagttgacataagacaggctgacataagagaaaacggtgagaggaaagagcaagatgcattaacacagcctgcaacaccaaggaatccgggcgattctagtaattcttttttatctttcgacgaatggaagaaggtcaagtccaaggagcactcttctggccctgaacgtcatcttagtagagtgagggagccagtcgatccctcttgctataaagagaaagaatgcataggagaagagttggaaatcgatttggggtttttgacaaacaaaaacgagtggagtgaaagagaagaaaatcaaaaaggattcaatgaggaaaaggacatagagaaagtttacaaaaaaaaattcaactatgcatccttggattgcgctgcaacaattgtcaaaagcaatccagaagcgattggagcgacttctacgttaattgagagcaaagacaagtatttattgaatccctgttctgctccgcagcaattcattgttatagagctttgtgaagatatcttagtggaggaaattgaaattgctaattacgaattcttttcctccaccttcaagagatttagggtgtctgtttctgatagaataccgatggttaaaaatgaatggacaatattaggagaattcgaggcaagaaattctagagaattacaaaagtttcaaatacataatccccaaatctgggcaagttatttgaaaatcgaaattttatcccattatgaggacgaattttattgtcccatatccttaatcaaagtatatggtaaatctatgatggatgagtttaagatcgatcaattgaaggctcaagaggataaagaacaatccataggaactaacaatataaacaatttgaatgaacaaaatatccaagacagatgtaacaatatagaaacgcgtttagagactccaaacacaagcaatctctctgacttagctggtgcattaagttgtacttctaagctcatccctttgaagttcgatgaatttttcaaggtgcttaatgcatccttttgtccttccaagcaaatgatatcttcttcttcttcttctgctgttcctgtaattccagaagaatccatttttaagaacatcatgaaaaggttatctcaattggagacaaattctagtttgacagtttcttacattgaggaacagagcaaattattatctaaaagttttgaacaacttgaaatggcgcacgaagcaaagttcagtcatcttgtcacgatattcaacgaaacaatgatgagtaatttggatttattgaataactttgccaatcaattgaaagatcaatctttacgtatattagaagaacagaaattagagaatgacaaatttactaaccgtcatttattgcatttggaaagattggaaaaagaagtcagttttcaaagaagaattgtttatgcgtcttttttcgccttcgtagggttgatatcctatcttttaataacgagagagctttactttgaagatttcgaagagagcaaaaatggcgctattgaaaaggcagacattgttcaacaagcaatcagatga

SEQ ID NO: 10429 - DNA, 1353 bp, Saccharomyces cerevisiae
atgtcctcaagatatagagtggaatatcatttgaagagccaccgcaaggatgagtttatagattgggtaaaggggctactggcctcaccttttgttctacatgccgtctctcatgaaggtgactacaatgacgacttagcaacaactcaacgtgtaaggtcgcagtatgctgatatctttaaagacattgaagggctgattaaagataaaatagaatttgactcaagaaacatgagccaagacgaaattgaagatggcgcctcttctcaatctctgaatatattaggacaatcgcgtttaaatcttttggttccatcaattggaacattctttacggaacttccattggaacaagcttttctatgggaagactcacaacgggccatttcggcgcgtagaatggtagcacccagttttaatgatatcaggcatatcctgaatactgcacagatatttcactttaagaaacaggagaacttacataatggtaaggttttgagattagtgacttttgatggagatgtgacgctgtatgaagatggtggctccctggtttacactaatcctgtaattccttatattctcaagctgttgcggtgcggtatcaatgtgggaatagtcactgcggccggatatgatgaagctggaacctatgagaacagattgaaaggattaattgttgcattacatgattcaactgatataccagtttctcaaaagcagaatttaacaataatgggtggtgagtcgagttaccttttccgttactatgaagacccggaggaagataactttggctttagacaaattgacaaagaggaatggctattgcctagaatgaaggcttggtccctcgaggacgtggaaaagactttggactttgccgagagaactcttaacaggttaagaaaaagactaaacctaccttcagagatttctattatccgtaaagtcagggcagtgggtatcgtcccaggcgaacggtacgatgaagcttctaaaagacaagttcctgttaagcttgatagggaacaactggaggaaatagttttaacccttcaaaacactttagagtcttttgccccatctagaagaattcaatttagttgttttgatggtggtagtgatgtctggtgtgatattggggggaaagatcttggtgttcgttcattgcaacaattttataaccctgaatctcctatccaaccctctgaaaccttacacgtaggcgatcagtttgcaccggtgggatcagcaaatgattttaaggcaaggctagctggatgtaccctctggatagcatcccctcaagaaacagtgaattatcttcatagattattagaaactgattaa

SEQ ID NO: 10430 - DNA, 1353 bp, Artificial Sequence
  Description of Artificial Sequence: Synthetic polynucleotide
atgtccagcagatatagagtggaatatcatttgaagagccaccgcaaggatgagtttatagattgggtaaaggggttgttagcctctccttttgttttgcatgccgtctctcatgaaggtgactacaatgacgacttagcaacaactcaacgtgtaaggagccagtatgctgatatctttaaagacattgaagggttgattaaagataaaatagaatttgacagtagaaacatgagccaagacgaaattgaagatggcgcctcttctcaatctttgaatatattaggacaatcccgtttaaatcttttggttccatctattggaacattctttacggaacttccattggaacaagcttttttatgggaagactctcaaagagccattagtgcgcgtagaatggtagcacccagttttaatgatatcaggcatatcttgaatactgcacagatatttcactttaagaaacaggagaacttacataatggtaaggttttgagattagtgacttttgatggagatgtgacgctttatgaagatggtggctccttggtttacactaatcctgtaattccttatattctcaagttgttgagatgcggtatcaatgtgggaatagtcactgcggccggatatgatgaagctggaacctatgagaacagattgaaaggattaattgttgcattacatgattctactgatataccagtttctcaaaagcagaatttaacaataatgggtggtgagagcagttaccttttccgttactatgaagacccggaggaagataactttggctttagacaaattgacaaagaggaatggttattgcctagaatgaaggcttggtccctcgaggacgtggaaaagactttggactttgccgagagaactcttaacaggttaagaaaaagattgaacttgccttctgagatttctattatccgtaaagtcagggcagtgggtatcgtcccaggcgaaagatacgatgaagcttctaaaagacaagttcctgttaagcttgatagggaacaattggaggaaatagttttaacccttcaaaacactttagagtcttttgccccatctagaagaattcaatttagttgttttgatggtggtagtgatgtctggtgtgatattggggggaaagatcttggtgttcgttctttgcaacaattttataaccctgaatctcctatccaaccctctgaaaccttacacgtaggcgatcagtttgcaccggtgggaagtgcaaatgattttaaggcaaggttggctggatgtaccctctggatagcatcccctcaagaaacagtgaattatcttcatagattattagaaactgattga

SEQ ID NO: 10431 - DNA, 2181 bp, Saccharomyces cerevisiae
atggcaagtgtcatgtcaaataataataataataataataataataatgccagttatatgtttacgaaccctttgtccaacacaggtggtggactcataaatgaaataaaagatgcaataaatgaaatggaacaattaaaggttctagagttaaagcaaatatgcaaatctctggatttatccataacgggcaaaaaggctgtcttacaagaccgaataaaacaattcttaagaaaatcctgtgatattggacatatagatccgtggaggcctaaggctattaagattcttatcgcgaaagtaaggataaactcatcattaccaaaatactctaccctttgggaaactttaaagacgggtgcgttcaagcatcctgtagcatcggggcaactacccgtgacagctctccagagtactgcattgccaccttattcccaacaacaggccttagcatattcttttacctcaccgttttacaaaccaatagtacaaataccggatgccaataaaaaattgaagcaatctgcaggaagaggttgtacaaaaatgaagttcaaggtaagtaaatctaatcatgatcttttgaaatctaacaagagttataaactgtatttgttttctggcttttcaataccgtttatatatgaaactgtgggccatgaggcaatagatttcccgtatccctgtgaactagtgtttaatggcaccaaactagaggacaacgtgaaaggtttaaagaaacaaaatgggacaggtaatcctgcaaatttaacgccttatcttaaagtaccgaccgagatgaatcacctagacttacattatctcaatattgataaagagtactctataagttgctttatagtggaagttttttcacctgaagctcttctggggaaaattctgaaaaggcccaaaattatcaagcaagccaccacagcatacatcaaaagaaccttgaatgagcaagatgatgacgatattattacaacctccacggtgctgagtttgcaatgtcctatatcttgtacaaggatgaagtatccggcgaagactgaccaatgtaagcatatccaatgttttgatgctctctggtttcttcactctcagtcacaagtccctacatggcagtgtccgatttgtcaacaccctataaaattcgaccagttgaagatttccgaatttgtagataatattattcaaaattgcaatgaagatgttgagcaagttgagatatctgttgatggctcatggaaaccgattcataatagttcggccgttataacggatactgttaaccaaaatcacagtgtgaaaaacgagaaccaaggcactgtcaaacaagagcaagattatgacagccgaaatgccttcgatactaatttgcgtaatggttcaaaccacaacgaacccgaaataatatctctggatagctcagatgatgaagcctttattccggctagtaaaagcttcccaacgcacgtgaacccccgtaatgaccaattaagagcagatatatttccctcagaatcggaaggatccagtgactacaaccccaatcatacatcaacgccgaaaggttctccaactatggaccaagataattatcaagatgcttttcaaatgaggtcatttttgaaccaaggcgctactacaaatataaatgacacaccgacgaacaatagcagtattaattctttcgttacggcgacgaatggtgacagcagaatattctacaatagagggccatcaacgccactattaccggctgttctacaaaatttgactaatcaaacggaagcgcagagaaacccctacggacctaattacaataccacagctcaagatcgtaatcttttgggaatcgaaggtgatttgcctccaatcccccctgtggacccaaattcagaagcagaaactgaactaccaacaaggaccacatcggcggcacatctccctccatatatacacgtgagcaccagcggccatggggatgatggaaaaattaggaagagaaggcattctaatgtttctatctacattccgaagaatccatacgccacccttatgaaacggagaccacaggcaaatcacgccataatgaataaaactctggcccaaactaatgactttaacacatcggctcaagataactcggaagtggtcgatttaacatcagattga

SEQ ID NO: 10432 - DNA, 2181 bp, Artificial Sequence
  Description of Artificial Sequence: Synthetic polynucleotide
atggcaagtgtcatgagtaataataataataataataataataataatgccagttatatgtttacgaaccctttgtccaacacaggtggtggactcataaatgaaataaaagatgcaataaatgaaatggaacaattaaaggttttggagttaaagcaaatatgcaaatctttagatttatccataacgggcaaaaaggctgtcttacaagacaggataaaacaattcttaagaaaatcctgtgatattggacatatagatccgtggaggcctaaggctattaagattcttatcgcgaaagtaaggataaactcttctttaccaaaatactctaccctttgggaaactttaaagacgggtgcgttcaagcatcctgtagcatctgggcaattgcccgtgacagctctccagagtactgcattgccaccttattcccaacaacaggccttagcatattcttttacctctccgttttacaaaccaatagtacaaataccggatgccaataaaaaattgaagcaatctgcaggaagaggttgtacaaaaatgaagttcaaggtaagtaaatctaatcatgatcttttgaaatctaacaagagttataaactttatttgttttctggcttttccataccgtttatatatgaaactgtgggccatgaggcaatagatttcccgtatccctgtgaattagtgtttaatggcaccaaattagaggacaacgtgaaaggtttaaagaaacaaaatgggacaggtaatcctgcaaatttaacgccttatcttaaagtaccgaccgagatgaatcacttagacttacattatctcaatattgataaagagtactctataagttgctttatagtggaagttttttctcctgaagctcttttggggaaaattttgaaaaggcccaaaattatcaagcaagccaccacagcatacatcaaaagaaccttgaatgagcaagatgatgacgatattattacaacctccacggtgttgagtttgcaatgtcctatatcttgtacaaggatgaagtatccggcgaagactgaccaatgtaagcatatccaatgttttgatgctctctggtttcttcactctcagtctcaagtccctacatggcagtgtccgatttgtcaacaccctataaaattcgaccagttgaagatttccgaatttgtagataatattattcaaaattgcaatgaagatgttgagcaagttgagatatctgttgatggctcctggaaaccgattcataatagttctgccgttataacggatactgttaaccaaaatcacagtgtgaaaaacgagaaccaaggcactgtcaaacaagagcaagattatgacagcagaaatgccttcgatactaatttgcgtaatggttccaaccacaacgaacccgaaataatatctttagatagcagtgatgatgaagcctttattccggctagtaaaagcttcccaacgcacgtgaacccccgtaatgaccaattaagagcagatatatttcccagtgaaagtgaaggatccagtgactacaaccccaatcatacaagtacgccgaaaggttctccaactatggaccaagataattatcaagatgcttttcaaatgaggtcttttttgaaccaaggcgctactacaaatataaatgacacaccgacgaacaatagcagtattaattctttcgttacggcgacgaatggtgacagcagaatattctacaatagagggccatctacgccattattaccggctgttttgcaaaatttgactaatcaaacggaagcgcagagaaacccctacggacctaattacaataccacagctcaagatcgtaatcttttgggaatcgaaggtgatttgcctccaatcccccctgtggacccaaattctgaagcagaaactgaattaccaacaaggaccacatctgcggcacatctccctccatatatacacgtgagcaccagcggccatggggatgatggaaaaattaggaagagaaggcattctaatgtttctatctacattccgaagaatccatacgccacccttatgaaaagaagaccacaggcaaatcacgccataatgaataaaactttggcccaaactaatgactttaacacatctgctcaagataactctgaagtggtcgatttaacatctgattga

SEQ ID NO: 10433 - DNA, 786 bp, Saccharomyces cerevisiae
atggcaggtttatcgttcgacaattatcaaagaaataatttcttagcggaaaactcgcacacacaacctaaggcaacttccacgggtaccaccattgtaggcgtaaaattcaataacggagtggtgattgcagcagatacaagatcaacacaaggtccaattgtcgcagataagaattgcgcaaaattgcatagaatttcccccaaaatatggtgtgctggtgccggtaccgccgccgatactgaggcagttacgcagttgatcgggtctaacattgaattacattccttatatacctcgagagaaccaagagtggtctcagctttacaaatgctaaagcagcacctatttaagtaccaaggtcatattggtgcttatttgattgttgcaggtgtagaccctacgggatctcatttgttctccattcatgcgcatggttctactgacgtgggctactacctttctctaggatctggttctctagcggcaatggctgtgttggaatcacactggaagcaagaccttacgaaggaggaagccataaagttggcctctgatgcaatccaggctggtatctggaatgatttggggtctggttctaatgtggatgtgtgtgtcatggaaataggtaaagatgcagaatacttgaggaattacttgactccaaatgttagagaagaaaagcagaaaagctacaaattccccaggggtacaactgctgtgctgaaggagagtattgtcaatatttgtgacatacaagaagaacaagtcgatataacggcttga

SEQ ID NO: 10434 - DNA, 786 bp, Artificial Sequence
  Description of Artificial Sequence: Synthetic polynucleotide
atggcaggtttatctttcgacaattatcaaagaaataatttcttagcggaaaactctcacacacaacctaaggcaacttccacgggtaccaccattgtaggcgtaaaattcaataacggagtggtgattgcagcagatacaagatctacacaaggtccaattgtcgcagataagaattgcgcaaaattgcatagaatttcccccaaaatatggtgtgctggtgccggtaccgccgccgatactgaggcagttacgcagttgatcgggtctaacattgaattacattccttatatacctccagagaaccaagagtggtctctgctttacaaatgttgaagcagcacctttttaagtaccaaggtcatattggtgcttatttgattgttgcaggtgtagaccctacgggatctcatttgttctccattcatgcgcatggttctactgacgtgggctactacctttctttgggatctggttctttagcggcaatggctgtgttggaatctcactggaagcaagaccttacgaaggaggaagccataaagttggcctctgatgcaatccaggctggtatctggaatgatttggggtctggttctaatgtggatgtgtgtgtcatggaaataggtaaagatgcagaatacttgaggaattacttgactccaaatgttagagaagaaaagcagaaaagctacaaattccccaggggtacaactgctgtgttgaaggagagtattgtcaatatttgtgacatacaagaagaacaagtcgatataacggcttga

SEQ ID NO: 10435 - DNA, 957 bp, Saccharomyces cerevisiae
atggggaaaggtgcggccaagtatggttttaaaagtggggttttccccacaacaaggtccattctgaagagccccactacaaagcagactgatattattaataaggtaaaatcacccaagcccaagggtgttcttggtattgggtatgccaaaggtgtaaaacatccaaaaggatcacatagattatcacccaaggtaaactttatcgacgtggataatctcattgcgaagaccgttgctgaaccccagagtataaaatccagtaacggttcagcacagaaagtgagattacaaaaagctgaattaagaagaaagtttttgattgaagcatttcgcaaggaagaggctaggctattacacaaacacgagtatttgcagaagaggacaaaggaactggaaaaagcaaaagaactggagctagaaaaactaaataaggaaaaatcttcagacttgactattatgactctagacaaaatgatgtctcaacctcttttaaggaacagatcaccagaagagagcgaattgttgaagttgaaaaggaattacaatcgatcgttgttgaactttcaggcgcacaagaaaaagctaaacgaattattaaacctctaccatgtcgctaatgaattcatcgttacagaatcccaactactaaagaaaattgataaggtttttaacgatgaaacggaggaattcactgatgcctatgatgtaacttctaacttcacgcaatttggaaatagaaaattattactttcaggtaacaccaccctacaaacccaaattaacaacgcaataatgggctctttgtcaaacgaaaagtttttcgatatttctttagtggattcatatctgaacaaggatttaaaaaacatttccaataaaattgattccaaattaaaccccacctctaatggagctggaaataatggtaataataataatacaaccaacttgtaa

SEQ ID NO: 10436 - DNA, 957 bp, Artificial Sequence
  Description of Artificial Sequence: Synthetic polynucleotide
atggggaaaggtgcggccaagtatggttttaaaagtggggttttccccacaacaaggtccattttgaagagccccactacaaagcagactgatattattaataaggtaaaaagtcccaagcccaagggtgttcttggtattgggtatgccaaaggtgtaaaacatccaaaaggatctcatagattatctcccaaggtaaactttatcgacgtggataatctcattgcgaagaccgttgctgaaccccagagtataaaatccagtaacggttctgcacagaaagtgagattacaaaaagctgaattaagaagaaagtttttgattgaagcatttcgcaaggaagaggctaggttattacacaaacacgagtatttgcagaagaggacaaaggaattggaaaaagcaaaagaattagagttagaaaaattgaataaggaaaaatcttctgacttgactattatgactttggacaaaatgatgtctcaacctcttttaaggaacagatctccagaagagagcgaattgttgaagttgaaaaggaattacaatagaagtttgttgaactttcaggcgcacaagaaaaagttgaacgaattattaaacctctaccatgtcgctaatgaattcatcgttacagaatcccaattattgaagaaaattgataaggtttttaacgatgaaacggaggaattcactgatgcctatgatgtaacttctaacttcacgcaatttggaaatagaaaattattactttctggtaacaccaccttacaaacccaaattaacaacgcaataatgggctctttgtctaacgaaaagtttttcgatatttctttagtggattcttatttgaacaaggatttaaaaaacatttccaataaaattgattccaaattaaaccccacctctaatggagctggaaataatggtaataataataatacaaccaacttgtga

SEQ ID NO: 10437 - DNA, 285 bp, Saccharomyces cerevisiae
atgtcgaacaaagttaaaaccaaggccatggtgccaccaataaattgcatatttaacttcttacaacagcaaacaccagtaacgatatggttattcgagcaaatcggcataagaatcaagggtaaaatagttggatttgatgagttcatgaatgttgtcatcgatgaagccgtggaaattcctgtgaatagtgccgatggtaaagaagatgtggagaagggcacgcccttggggaagatcctgttgaaaggcgataatatcacattgataacatcagcggactga

SEQ ID NO: 10438 - DNA, 285 bp, Artificial Sequence
  Description of Artificial Sequence: Synthetic polynucleotide
atgtccaacaaagttaaaaccaaggccatggtgccaccaataaattgcatatttaacttcttacaacagcaaacaccagtaacgatatggttattcgagcaaatcggcataagaatcaagggtaaaatagttggatttgatgagttcatgaatgttgtcatcgatgaagccgtggaaattcctgtgaatagtgccgatggtaaagaagatgtggagaagggcacgcccttggggaagatcttgttgaaaggcgataatatcacattgataacatctgcggactga

SEQ ID NO: 10439 - DNA, 2919 bp, Saccharomyces cerevisiae
atggacaacttacaggtatctgatatagaaactgctttacaatgcatatcgtctactgcatctcaagatgataaaaacaaagcgcttcaatttttagaacaattccaaagatcaactgttgcctggtctatttgcaatgaaatattgtctaaagaagatcctacaaacgctcttctagaattaaatatttttgctgcgcaaactttaaggaataaagtcacatatgatctatcacaattagaaaataatctaccacaattcaaggattctttgttgacgcttttattatcgcataaccaaaaattgattattacacaactgaatgtcgcgttagcacgtttggcgatccaatttttagaatggcagaatccaattttcgagatcatttcattgttgaattcttcaccatctatattattaaactttttaagaattttacctgaggaaaccttagacattgcatctacttccttgacagaagtggaattcaattccagaattcatgaactaattgatccgatagcagaagatgtattgaaattccttgtatcatgcatagacctattacaaaatacagacgggaattccagctcatctatttcattagaacaaattttacggtgtttgaactcttggtcgtatgaattccctgttgaacagttgctaaccgtacaacccttaataaatctcgtgtttgaaactatttccaatggtaatgaaagtgacatggaggcattcgattccgctattgattgtctctgcgttatcctcagagaaagcagagatactactaatgagcagttgatttctgctttatttcatcagttaatgcttttacaagaaaaactattgcctactctgttcacagaccatcctttgaacgatgaatatgatgacgatctcctagaaggtatgacacgattattcgtagaagctggcgaggcttggtcagttgtcatttctaaaaaccccgatttttttaaaccaatggttttggtattattgatgttgacctgcaaaaatgaagacttagatgtcgtttcctatactttccccttttggtttaacttcaaacaaagtttagttttgccaagatatcaagaatcaagaaaagcttactctgatatttttgttaaattaataaatggtataattactcatttacaatatccatcaggccagttttcatctaaagaggaagaagataaatttaaagatttcaggtatcatatgggcgatgtgttaaaagactgtactgcagtggtgggaacttctgaggctttatcgcaaccactaataagaattaagtccgcaatagaaaacaacaatagctggcaaataatggaagccccattattttccctgaggactatggctaaagaaatttcgttgactgaaaacactatattgccagaaatcattaaaatcatttgtaaccttccagagcaggccaagattaggtatgcatcaacattagttcttggtagatataccgaatggacagccaagcatccagaactactagaagttcaattgcaatatatttttaacggttttcaactgcatgagggttcatcggatatgcaaagtataatcactgcatcatcacatgcattaatgttcttctgttcggactgctctaaactattagttgggtatattgatcagttgattaatttcttcctcaacgtgcagagttcgattgatattgagtcacaatttgaactatgtcaaggattaagtgcagtaataaataatcagccagaggccaaagtttcagtaatatttcaaaagctcgtagatgataatttgcgacaaatcgaggctttgattcctcaatggaaagcaaatccaacgctcttggctccacagattgctgataagattgatttgctatatgcgctttttgaagaattgaaaccgagatacaattatcctcagcaaggatcggaacctttactccccaggatagaatttatttggaaggcattaagaactctgctagttgatgcaggtgcaatgactgatagtattatcgtagaaagagtagctaaattgctacgcagaatttttgagagatttcatgtattttgcgagccaatattaccttctgttgccgaatttctaatccaaggttatttaacgactggattcggttcctatctgtggtgttctggttcccttattgttatatttggtgacgatgaatcattccccatatccccgagtctgaaagatgctgtctggaaatttgccctctcccaatgcgagacgttcatactgaatttcaacaagtttgataaacttcaattaaacgattatcatgaggcaataatcgattttttctcattaatttcagacttgataatgttttatcctggcgcatttttgaattcaacagagcttctaggccccgtactgaatgttgccctcgagtgtgttaataagcttgataactacgatgcttacatatgtatcttgcgttgcttagatgatatcatatcctgggggttcaagactccaccgatctcaacagtgtccatcgagattgttccagatgaatggaggaagcaagttattaacgaagtcgtgatagcccacggtaaccaattgatattagtgttattcatcgggctggttactacttttgaaaacaccgctcattcagatgccatcagttgtattgtaaaatgtttaaggatattgacagaggcaaacaacaacgatgccactatttgcatcgattggatttacaaagtggtggaacaacttggccaagtaacccttaatgaaagagataatttggcgaaggccgtggttgaggggttgaattcaaaggattacagaaaggtgagggaaggaattagggcgtttgttggatggtattcaagaaagaatatcaattcgaggtttgaatag

SEQ ID NO: 10440 - DNA, 2919 bp, Artificial Sequence
  Description of Artificial Sequence: Synthetic polynucleotide
atggacaacttacaggtatctgatatagaaactgctttacaatgcatatcttctactgcatctcaagatgataaaaacaaagcgcttcaatttttagaacaattccaaagatctactgttgcctggtctatttgcaatgaaatattgtctaaagaagatcctacaaacgctcttttagaattaaatatttttgctgcgcaaactttaaggaataaagtcacatatgatttatctcaattagaaaataatttaccacaattcaaggattctttgttgacgcttttattatctcataaccaaaaattgattattacacaattgaatgtcgcgttagcacgtttggcgatccaatttttagaatggcagaatccaattttcgagatcatttctttgttgaattcttctccatctatattattaaactttttaagaattttacctgaggaaaccttagacattgcatctacttccttgacagaagtggaattcaattccagaattcatgaattgattgatccgatagcagaagatgtattgaaattccttgtaagttgcatagacttattacaaaatacagacgggaattccagctcttctatttctttagaacaaattttaagatgtttgaactcttggagttatgaattccctgttgaacagttgttgaccgtacaacccttaataaatctcgtgtttgaaactatttccaatggtaatgaaagtgacatggaggcattcgattccgctattgattgtctctgcgttatcctcagagaaagcagagatactactaatgagcagttgatttctgctttatttcatcagttaatgcttttacaagaaaaacttttgcctactttattcacagaccatcctttgaacgatgaatatgatgacgatctcttggaaggtatgacaagattattcgtagaagctggcgaggcttggtctgttgtcatttctaaaaaccccgatttttttaaaccaatggttttggtattattgatgttgacctgcaaaaatgaagacttagatgtcgtttcctatactttccccttttggtttaacttcaaacaaagtttagttttgccaagatatcaagaatctagaaaagcttactctgatatttttgttaaattaataaatggtataattactcatttacaatatccaagtggccagttttcttctaaagaggaagaagataaatttaaagatttcaggtatcatatgggcgatgtgttaaaagactgtactgcagtggtgggaacttctgaggctttatctcaaccattgataagaattaagtccgcaatagaaaacaacaatagctggcaaataatggaagccccattattttccttaaggactatggctaaagaaatttctttgactgaaaacactatattgccagaaatcattaaaatcatttgtaaccttccagagcaggccaagattaggtatgcaagcacattagttcttggtagatataccgaatggacagccaagcatccagaattattggaagttcaattgcaatatatttttaacggttttcaattgcatgagggttcttctgatatgcaaagtataatcactgcatcttctcatgcattaatgttcttctgttctgactgctctaaattattagttgggtatattgatcagttgattaatttcttcctcaacgtgcagagttctattgatattgagtctcaatttgaattatgtcaaggattaagtgcagtaataaataatcagccagaggccaaagtttctgtaatatttcaaaagctcgtagatgataatttgagacaaatcgaggctttgattcctcaatggaaagcaaatccaacgctcttggctccacagattgctgataagattgatttgttatatgcgctttttgaagaattgaaaccgagatacaattatcctcagcaaggatctgaacctttactccccaggatagaatttatttggaaggcattaagaactttattggttgatgcaggtgcaatgactgatagtattatcgtagaaagagtagctaaattgttacgcagaatttttgagagatttcatgtattttgcgagccaatattaccttctgttgccgaatttttgatccaaggttatttaacgactggattcggttcctatttatggtgttctggttcccttattgttatatttggtgacgatgaatctttccccatatccccgagtttgaaagatgctgtctggaaatttgccctctcccaatgcgagacgttcatattgaatttcaacaagtttgataaacttcaattaaacgattatcatgaggcaataatcgattttttctctttaatttctgacttgataatgttttatcctggcgcatttttgaattctacagagcttttgggccccgtattgaatgttgccctcgagtgtgttaataagcttgataactacgatgcttacatatgtatcttgcgttgcttagatgatatcatatcctgggggttcaagactccaccgatcagtacagtgtccatcgagattgttccagatgaatggaggaagcaagttattaacgaagtcgtgatagcccacggtaaccaattgatattagtgttattcatcgggttggttactacttttgaaaacaccgctcattctgatgccatcagttgtattgtaaaatgtttaaggatattgacagaggcaaacaacaacgatgccactatttgcatcgattggatttacaaagtggtggaacaacttggccaagtaacccttaatgaaagagataatttggcgaaggccgtggttgaggggttgaattctaaggattacagaaaggtgagggaaggaattagggcgtttgttggatggtattctagaaagaatatcaattctaggtttgaatga

SEQ ID NO: 10441 - DNA, 1620 bp, Saccharomyces cerevisiae
atgccattgaatgaaaaatacgagaggcctccgcaacctcctccagcatatgatcccaaccataggccgcccagttcttccgagaactctgccgcggcgaatgtcaacgatggccagacgccgtaccattttagacaggatcaatattacaatctaaattccaaaacgagtggggctcctatagggagcttcgacgaggcctttcctactgaaaatgacaacaagcccaggtggaacgattggccatttaccatttttttcctatgcacggtaggcggattcatcgccattgctgccataaccttaagagcgtggtcccaaacctatagcagtacgggttccggaatatacgatggtgtgaatactggtacgctgaacaccaatgctgccatcctgctagttttcgtgtgcattattgccctagtattctccgttttgggcctcacactttgtcgaatttttccgaagcagtttatatattgcggtatggtcatcaacctagtggcttctcttgggactgccatcatgtacatgtctttgaggtactggtctgcaggtattgtgtttttagtcttcacgttcatgaccgcgtggtgctactggggtatgaggtctagaattcccctttctgtggcggtattgaaagtcgtcgtcgatgccatgaagaaatgcccacagatcttctttgtttcatttgttggagcgctagttgctagtgcgtttgggtttctcttctcagcagtcattgtggctacgtacataaagtacgatcctaatagctcgaatggcggctgtgacgtttctggtggcagctgttcgcattccaaattgattggtgttttggttgtggtttttttctgcggctattatatctctgaagtaataagaaacgtcatacattgtgttatttctggcgtctttggcagctggtattatatgtcaaagtctgaccaaggaatgccaaggtggcccgcatttggagcattgaagagagccatgacttactcgttcggttccatttgctttgggtccttgctagtcgctttgatcgacctgttgagacaaatattgcaaatgatcagacacgatgttacctccagcggtggcggtcaaattgccatccagattttgtttatggtgtttgactggattatcggctttctgaagtggctcgccgagtatttcaatcattatgcatactcgttcatcgctctttatggtaaaccgtatttaagagcggccaaagaaacctggtatatgttaagagaaaagggaatggacgccctaatcaatgataatttaattaacattgcactgggtctattttcaatgtttgctagttatatgaccgctttgttcacgttcttgtatctaaggtttacctcgcctcaatacaattcgaacggcgcttacaacggcgccctaatggcattctcatttgttattgctttacagatttgcaacattgcaacagaagccattagatccggtactgcaactttctttgttgctcttggtaatgacccggaggtcttccatcattcttaccctcataggtttgatgagatttttagggcatatcctgatgtactcagaaaattgagtcaccagaatgtgtga

SEQ ID NO: 10442 - DNA, 1620 bp, Artificial Sequence
  Description of Artificial Sequence: Synthetic polynucleotide
atgccattgaatgaaaaatacgagaggcctccgcaacctcctccagcatatgatcccaaccataggccgcccagttcttccgagaactctgccgcggcgaatgtcaacgatggccagacgccgtaccattttagacaggatcaatattacaatttgaattccaaaacgagtggggctcctatagggagcttcgacgaggcctttcctactgaaaatgacaacaagcccaggtggaacgattggccatttaccatttttttcttgtgcacggtaggcggattcatcgccattgctgccataaccttaagagcgtggtcccaaacctatagcagtacgggttccggaatatacgatggtgtgaatactggtacgttgaacaccaatgctgccatcttattggttttcgtgtgcattattgccttggtattctccgttttgggcctcacactttgtagaatttttccgaagcagtttatatattgcggtatggtcatcaacttggtggcttctcttgggactgccatcatgtacatgtctttgaggtactggtctgcaggtattgtgtttttagtcttcacgttcatgaccgcgtggtgctactggggtatgaggtctagaattcccctttctgtggcggtattgaaagtcgtcgtcgatgccatgaagaaatgcccacagatcttctttgtttcttttgttggagcgttggttgctagtgcgtttgggtttctcttcagtgcagtcattgtggctacgtacataaagtacgatcctaatagcagtaatggcggctgtgacgtttctggtggcagctgttctcattccaaattgattggtgttttggttgtggtttttttctgcggctattatatctctgaagtaataagaaacgtcatacattgtgttatttctggcgtctttggcagctggtattatatgtccaagtctgaccaaggaatgccaaggtggcccgcatttggagcattgaagagagccatgacttactctttcggttccatttgctttgggtccttgttggtcgctttgatcgacttgttgagacaaatattgcaaatgatcagacacgatgttacctccagcggtggcggtcaaattgccatccagattttgtttatggtgtttgactggattatcggctttttgaagtggctcgccgagtatttcaatcattatgcatactctttcatcgctctttatggtaaaccgtatttaagagcggccaaagaaacctggtatatgttaagagaaaagggaatggacgccttgatcaatgataatttaattaacattgcattgggtttattttccatgtttgctagttatatgaccgctttgttcacgttcttgtatttgaggtttacctctcctcaatacaatagcaacggcgcttacaacggcgccttgatggcattctcctttgttattgctttacagatttgcaacattgcaacagaagccattagatccggtactgcaactttctttgttgctcttggtaatgacccggaggtcttccatcattcttaccctcataggtttgatgagatttttagggcatatcctgatgtactcagaaaattgagtcaccagaatgtgtga

SEQ ID NO: 10443 - DNA, 147 bp, Saccharomyces cerevisiae
atgtcttacacacgagtagatcatcccactggaaaaatggcttgtcacctgaggcagattttggcaagcccactgtttttcgcaaattatgtactacatgcagccattcactacccttcgagcgacatacgcggcgacatcctgtag

SEQ ID NO: 10444 - DNA, 147 bp, Artificial Sequence
  Description of Artificial Sequence: Synthetic polynucleotide
atgtcttacacaagagtagatcatcccactggaaaaatggcttgtcacttgaggcagattttggcaagcccattatttttcgcaaattatgtattacatgcagccattcactacccttccagcgacatacgcggcgacatcttgtga

SEQ ID NO: 10445 - DNA, 2433 bp, Saccharomyces cerevisiae
atgaaaagaagaagcgatgctttgttgggaagtttccaggccaccaacgttacgccgccaagcgataatagtaatagtacggccggtggagccaatggaagtaactcaggaacaccaacttctactagcggtaagaagagaaacaagcttataaaatcttgtggcttttgcagaaggagaaaacttcgttgtgatcagcaaaaacctatgtgttctacatgcatttctagaaacttaacaacctgtcaatatgctgaagaattcaacaaaaacatcgaaaagaaagctacctatggtccctatcctaacgccgatttacttaagaaagttgaagaactagaaaacaaaatacgtattctagaagctgaaaaaaacactaattcgtctgcgagctccatgtacacttcgccaaatttccctcctttaggcactagtgtaggtagaggttctactgaaacttcatctccattacccgatggtgtaataaatccatatgccgaccggtactacctacaaagtaaacattccggaagatcaacactatacggccccacttctatgagaacccaaattgcaaatagtaattgggggttcattgaaaaatataaacaattatgggcgaaggttaaagtagaaagaaataaatggaagcaaaacaaccaaaaaacgatgtgcagggaactaggccttttggatgagtcggattggcagccagatccattaatcaaacagatatgtcgtttcctaccatcatataacaaagctttgtctattttagatgatttctttaatgatggagcatgcaatgagatcaacgtgattcttgataaggcaaaagttagaagagactttttagattatttcatgcccgaaaaagaggtaaaggcggaaggtgacagatccatagtttatattttatccaatccaaagaaaaattattacaaagctgctgtgatactattaatcctatgtctgaaatacttccatacagatgtcccaaccccaattgagaagttctttactttactaaagggggcctccaccgctaaggtgttctacattgagcgtgcacaaatgttaatacttttctactaccatcgtgaaacatattcattcggtggagatggctccgatttggttaatataaatgaatgtttagttactacggttactacaatagggttgcatttaaacattagagaaactttcaaggaacatgaggtttttatgggtagcatcgaaagtttagaaaatgtctggttaatggcaatatttatcgattataacatatcttgtaacgttggtagacccttattgattaacaaattttatctagacgaaaaccaagatcattgcatattgaatagtaaaagtaaaacatatgaggggaagctgaaaagatatttaaaacttacaaggccaatgttgttaactctttatgatagagataaattcccggatttgaaagcttattccaagcgaattatcaattttgtagaagaagaacttggtccacttggacattacacaggtgaaaatatatcggaagaagttccattaagggaaagtagaattttaagtatggcagtcggactattattgtcgttttatgcactaatacattctgtgctgaaagtcagaaacatagaatccaaaaataatacgtttcaattggttttgatcaatttttccatcattgtgaataccacaattcgatgctatcgtatcgacaaagcactttacccagagaaattcgaagcctccaacccgcacttaccgccacatatggcgttatcaatgagcctcacggcagggcttttttccaaaacattggtgtttttttgttctctgatctactttaagttgacgcttttcgaaaatggactatgtctatccaacgatatggaagttggatggtcggatttgacgaaattgactgttcctttagacaaggatctatctttaggtacagcaatgagcttgtactcgtcaatcttcgatcgcttgttcacggtcggaaataaagaattaatacgcacaatgcatagatcatcacaatttgtgatagagctagctattgaaaggacctataggactattcttggcaacgttattgaattcagaaagttgaccgaggaaacatggctagcacaaatcaaacaagaactagatccgcagagcgataatccatcatcagaagctaaaattgtgagtgataggcagcgggatctcagccttgcagttccaacgcccacgccctcaataattccaatgttaccctcgcctggtgaaactaagaaccatgcaaagagtcaatcagagatcattcagatgctgacagatgaattttgggcaaattataactcaggctgggaagagttgattaatcaatctgaattttccactcttttcgatgattacaaagacaattaa

SEQ ID NO: 10446 - DNA, 2433 bp, Artificial Sequence
  Description of Artificial Sequence: Synthetic polynucleotide
atgaaaagaagaagcgatgctttgttgggaagtttccaggccaccaacgttacgccgccaagcgataatagtaatagtacggccggtggagccaatggaagtaactctggaacaccaacttctactagcggtaagaagagaaacaagcttataaaatcttgtggcttttgcagaaggagaaaacttcgttgtgatcagcaaaaacctatgtgttctacatgcatttctagaaacttaacaacctgtcaatatgctgaagaattcaacaaaaacatcgaaaagaaagctacctatggtccctatcctaacgccgatttacttaagaaagttgaagaattggaaaacaaaatacgtattttggaagctgaaaaaaacactaattcttctgcgagctccatgtacacttctccaaatttccctcctttaggcactagtgtaggtagaggttctactgaaacttcttctccattacccgatggtgtaataaatccatatgccgacagatactacttacaaagtaaacattccggaagatctacattgtacggccccacttctatgagaacccaaattgcaaatagtaattgggggttcattgaaaaatataaacaattatgggcgaaggttaaagtagaaagaaataaatggaagcaaaacaaccaaaaaacgatgtgcagggaattaggccttttggatgagtctgattggcagccagatccattaatcaaacagatatgtcgtttcttaccatcttataacaaagctttgtctattttagatgatttctttaatgatggagcatgcaatgagatcaacgtgattcttgataaggcaaaagttagaagagactttttagattatttcatgcccgaaaaagaggtaaaggcggaaggtgacagatccatagtttatattttatccaatccaaagaaaaattattacaaagctgctgtgatattattaatcttgtgtttgaaatacttccatacagatgtcccaaccccaattgagaagttctttactttattgaagggggcctccaccgctaaggtgttctacattgagcgtgcacaaatgttaatacttttctactaccatcgtgaaacatattctttcggtggagatggctccgatttggttaatataaatgaatgtttagttactacggttactacaatagggttgcatttaaacattagagaaactttcaaggaacatgaggtttttatgggtagcatcgaaagtttagaaaatgtctggttaatggcaatatttatcgattataacatatcttgtaacgttggtagacccttattgattaacaaattttatttggacgaaaaccaagatcattgcatattgaatagtaaaagtaaaacatatgaggggaagttgaaaagatatttaaaacttacaaggccaatgttgttaactctttatgatagagataaattcccggatttgaaagcttattccaagagaattatcaattttgtagaagaagaacttggtccacttggacattacacaggtgaaaatatatctgaagaagttccattaagggaaagtagaattttaagtatggcagtcggattattattgagtttttatgcattaatacattctgtgttgaaagtcagaaacatagaatccaaaaataatacgtttcaattggttttgatcaatttttccatcattgtgaataccacaattagatgctatcgtatcgacaaagcactttacccagagaaattcgaagcctccaacccgcacttaccgccacatatggcgttatctatgagcctcacggcagggcttttttccaaaacattggtgtttttttgttctttgatctactttaagttgacgcttttcgaaaatggattatgtttatccaacgatatggaagttggatggtctgatttgacgaaattgactgttcctttagacaaggatttatctttaggtacagcaatgagcttgtactcttctatcttcgatcgcttgttcacggtcggaaataaagaattaatacgcacaatgcatagaagttctcaatttgtgatagagttggctattgaaaggacctataggactattcttggcaacgttattgaattcagaaagttgaccgaggaaacatggttggcacaaatcaaacaagaattagatccgcagagcgataatccatcttctgaagctaaaattgtgagtgataggcagagagatctcagccttgcagttccaacgcccacgccctccataattccaatgttaccctctcctggtgaaactaagaaccatgcaaagagtcaaagtgagatcattcagatgttaacagatgaattttgggcaaattataacagtggctgggaagagttgattaatcaatctgaattttccactcttttcgatgattacaaagacaattga

SEQ ID NO: 10447 - DNA, 567 bp, Saccharomyces cerevisiae
atgggcaaaaccgcggataatcatggtccagtacgttctgagacagcacgtgaaggaagagaaaaccaggtttactcacccgttacaggtgcaagattagttgctggctgcatatgtttaacacccgacaagaagcaagttctcatgattacttcttctgcacacaagaaaagatggattgtccccaaaggtggcgttgagaaagacgagcctaattacgagacgactgcccaacgagaaacttgggaggaagctggttgcataggtaaaattgtcgccaatttgggtacagttgaagacatgagaccccctaaggactggaacaaagacattaagcaattcgagaactctcgaaaagattcagaagtagcaaagcacccgccaagaaccgaatttcatttttatgaattagagattgaaaatctccttgataaatttccggaatgtcacaaaagacatagaaagctatactcttatacagaagctaaacaaaacttgatagacgccaagaggcctgaattgttggaggcccttaataggtctgctatcattaaagacgacaaatag

SEQ ID NO: 10448 - DNA, 567 bp, Artificial Sequence
  Description of Artificial Sequence: Synthetic polynucleotide
atgggcaaaaccgcggataatcatggtccagtacgttctgagacagcacgtgaaggaagagaaaaccaggtttactctcccgttacaggtgcaagattagttgctggctgcatatgtttaacacccgacaagaagcaagttctcatgattacttcttctgcacacaagaaaagatggattgtccccaaaggtggcgttgagaaagacgagcctaattacgagacgactgcccaaagagaaacttgggaggaagctggttgcataggtaaaattgtcgccaatttgggtacagttgaagacatgagaccccctaaggactggaacaaagacattaagcaattcgagaactctagaaaagattctgaagtagcaaagcacccgccaagaaccgaatttcatttttatgaattagagattgaaaatctccttgataaatttccggaatgtcacaaaagacatagaaagttgtactcttatacagaagctaaacaaaacttgatagacgccaagaggcctgaattgttggaggcccttaataggtctgctatcattaaagacgacaaatga

SEQ ID NO: 10449 - DNA, 939 bp, Saccharomyces cerevisiae
atggttcctgctgaatctaatgctgtacaagcgaaactcgctaaaaccttacaaagattcgaaaataagatcaaagctggagattattacgaagcgcatcaaacgttgagaactattgctaatagatatgttagaagtaaatcatacgagcatgccatagaactaattagtcaaggggccctttcatttttaaaggcgaagcagggcggttcaggcacggatttgatcttctatcttttagaagtttatgatttagcggaagttaaagttgatgacatctcagttgctagattggttagattaatagccgaattggatcctagcgagcccaatttaaaggacgttattactggtatgaacaattggtctatcaaatttagtgaatacaaatttggagatccttacttgcacaacaccattggtagcaaactattagagggagatttcgtttatgaagctgagagatattttatgttaggtacacatgattcaatgatcaaatatgtcgatttactatgggactggttatgccaagttgatgatatcgaagatagcacggtggctgagttcttcagcagattggttttcaactatttattcatctctaacatatcatttgcacatgaatcaaaagacatttttttggaaagatttattgagaaatttcaccccaagtacgagaaaattgataaaaatggttatgaaatagttttttttgaagattattccgacctaaattttttgcaattgttgctaattacctgtcagactaaggataagagctatttcttgaatttaaagaaccattatttagatttttctcaagcttacaaaagtgagttagaatttttgggccaggaatatttcaatattgttgctcctaaacaaacgaatttcctacaagacatgatgtcgggattcctgggcggatcgaagtga

SEQ ID NO: 10450 - DNA, 939 bp, Artificial Sequence
  Description of Artificial Sequence: Synthetic polynucleotide
atggttcctgctgaatctaatgctgtacaagcgaaactcgctaaaaccttacaaagattcgaaaataagatcaaagctggagattattacgaagcgcatcaaacgttgagaactattgctaatagatatgttagaagtaaatcttacgagcatgccatagaattgattagtcaaggggccctttcttttttaaaggcgaagcagggcggttctggcacggatttgatcttctatcttttagaagtttatgatttagcggaagttaaagttgatgacatctccgttgctagattggttagattaatagccgaattggatcctagcgagcccaatttaaaggacgttattactggtatgaacaattggtctatcaaatttagtgaatacaaatttggagatccttacttgcacaacaccattggtagcaaattattagagggagatttcgtttatgaagctgagagatattttatgttaggtacacatgattctatgatcaaatatgtcgatttattatgggactggttatgccaagttgatgatatcgaagatagcacggtggctgagttcttcagcagattggttttcaactatttattcatctctaacatatcctttgcacatgaaagtaaagacatttttttggaaagatttattgagaaatttcaccccaagtacgagaaaattgataaaaatggttatgaaatagttttttttgaagattattccgacttgaattttttgcaattgttgttaattacctgtcagactaaggataagagctatttcttgaatttaaagaaccattatttagatttttctcaagcttacaaaagtgagttagaatttttgggccaggaatatttcaatattgttgctcctaaacaaacgaatttcttacaagacatgatgtctggattcttgggcggatccaagtga

SEQ ID NO: 10451 - DNA, 2331 bp, Saccharomyces cerevisiae
atggctgatagacctgctattcagttgatagatgaagagaaggaatttcatcaaagtgcattacaatattttcaacaatgtattggaaatcgtgatgttggtctagattaccatgtcatctcagttttcggttctcaatcgagtggtaaatcgactttacttaacgtcttgtttaacaccaactttgataccatggatgctcaggtgaaaaggcagcagactactaaaggcatttggttggctcacactaaacaggttaatacaactattgaaatcgataatgatcgtccagatatttttgtgctagatgttgagggctccgatggttcagaaagaggtgaagaccaagattttgagagaaaagccgctttatttgccattgcagtatctgaagttcttatagttaatatgtgggagcagcaaattgggctatatcaaggtaataatatggctttattaaaaacagtttttgaggtcaacctttccctatttggcaagaatgataatgaccacaaggtgctgttactttttgtaattagagatcatgtaggtgtgactccactctcgagtttgagtgattccgttacgagagaattggaaaaaatatggacagagttaagtaaacctgctggttgtgagggttctagcctgtatgattatttcgatttaaagtttgtcgggctagctcataagttgttgcaagaagacaaatttacccaggatgtcaagaaattaggtgattcgtttgtgatgaaaggtacggaaaactattatttcaaacctcaatatcaccataggttgccattagatggttggactatgtacgcagaaaattgttgggatcaaattgaacgtaacaaggatttagatcttccaactcagcaaattctggttgctagatttaaaactgaagaaatatctaatgaagctctagaagagttcatttcaaaatatgatgaatcgattgctcctttaaagggtaacttgggatctttaacatctcagctagtgaagctaaaagaagaatgtctgacaaaatatgatgaacaagcatcgcgctatgcaagaaacgtttatatggagaaacgagaagctttaaatacaaagctgaattcacatatttcaggtacaattaatgagttcttggaatcattaatggaaaagttatgggacgatttaaaattggaggtgtcttctagagacaaagctactacctcttttgtagaaagtgtggcggcaggtaagagtaagattgagaaagaatttaacgaatcaatggagaccttcaaaaagttagggctactaatatcaaacgaagagattacctgcaaattttccgacgatattgaagaaagaatcaagcaactacgtgatgctgaattgaaagcaaaaatcggtcgtattaaaaaaaatctggttcccgaattaaaggatcatgtgattcatttactatcacatccatccaaaaaggtttgggatgatataatgaacgattttgaatctactatcaaagacaatatatctgcgtatcaagtggaaaaagataaatatgattttaaaattggactttcagagagcgaaaacgcgaagatttacaaaaatattagaatattggcgtggagaaccttggataccacagtacatgactacctgaaaatagatacgattgttagtatattgagagacaggtttgaagatgtattcagatatgatgctgaaggttctccaagattgtggaaaacagaagaagagattgatggggcattccgtgttgcaaaagaacatgccctggaagtttttgaggttctttcacttgctgtaacctcagataacgttgaaattattcctgatgtaccaatggctgaagaggaaagcggcgaggacaacgaaatatatcgggacaacgaaggtgtgtttcattcccgtcgtttcgcacacatcttgactgaattgcaaaaggagaatgttttagatcaattccgcaggcagattaacattactgttctggattcgaaaaggtctatcatcactactagaacgcatattccaccttggatttacgttttgctagccgtattagggtggaacgaattcgtggctgtcataagaaaccccttatttgtaacccttaccttgatcttaggtgcaaccttttttgttattcataagttcggcctctggggccctgttgttaatgttgttcaaagtgcagttggtgaaacaagaactgcaataaaggataaactaaggcaatttgtcgttgaagatcatgaagtgaaggaatcttttgaaatgaaagatttctcaaaaaacgagcaaaaagaaaaatga

SEQ ID NO: 10452 - DNA, 2331 bp, Artificial Sequence
  Description of Artificial Sequence: Synthetic polynucleotide
atggctgatagacctgctattcagttgatagatgaagagaaggaatttcatcaaagtgcattacaatattttcaacaatgtattggaaatcgtgatgttggtttggattaccatgtcatctccgttttcggttctcaaagtagtggtaaatctactttacttaacgtcttgtttaacaccaactttgataccatggatgctcaggtgaaaaggcagcagactactaaaggcatttggttggctcacactaaacaggttaatacaactattgaaatcgataatgatcgtccagatatttttgtgttggatgttgagggctccgatggttctgaaagaggtgaagaccaagattttgagagaaaagccgctttatttgccattgcagtatctgaagttcttatagttaatatgtgggagcagcaaattgggttatatcaaggtaataatatggctttattaaaaacagtttttgaggtcaacctttccttatttggcaagaatgataatgaccacaaggtgttattactttttgtaattagagatcatgtaggtgtgactccactctccagtttgagtgattccgttacgagagaattggaaaaaatatggacagagttaagtaaacctgctggttgtgagggttctagcttgtatgattatttcgatttaaagtttgtcgggttggctcataagttgttgcaagaagacaaatttacccaggatgtcaagaaattaggtgattcttttgtgatgaaaggtacggaaaactattatttcaaacctcaatatcaccataggttgccattagatggttggactatgtacgcagaaaattgttgggatcaaattgaacgtaacaaggatttagatcttccaactcagcaaattttggttgctagatttaaaactgaagaaatatctaatgaagctttggaagagttcatttccaaatatgatgaaagtattgctcctttaaagggtaacttgggatctttaacatctcagttggtgaagttgaaagaagaatgtttaacaaaatatgatgaacaagcatctcgctatgcaagaaacgtttatatggagaaaagagaagctttaaatacaaagttgaattctcatatttctggtacaattaatgagttcttggaatctttaatggaaaagttatgggacgatttaaaattggaggtgtcttctagagacaaagctactacctcttttgtagaaagtgtggcggcaggtaagagtaagattgagaaagaatttaacgaaagtatggagaccttcaaaaagttagggttgttaataagcaacgaagagattacctgcaaattttccgacgatattgaagaaagaatcaagcaattgcgtgatgctgaattgaaagcaaaaatcggtcgtattaaaaaaaatttggttcccgaattaaaggatcatgtgattcatttattatctcatccatccaaaaaggtttgggatgatataatgaacgattttgaatctactatcaaagacaatatatctgcgtatcaagtggaaaaagataaatatgattttaaaattggactttctgagagcgaaaacgcgaagatttacaaaaatattagaatattggcgtggagaaccttggataccacagtacatgactacttgaaaatagatacgattgttagtatattgagagacaggtttgaagatgtattcagatatgatgctgaaggttctccaagattgtggaaaacagaagaagagattgatggggcattccgtgttgcaaaagaacatgccttggaagtttttgaggttctttctcttgctgtaacctctgataacgttgaaattattcctgatgtaccaatggctgaagaggaaagcggcgaggacaacgaaatatatagagacaacgaaggtgtgtttcattcccgtcgtttcgcacacatcttgactgaattgcaaaaggagaatgttttagatcaattccgcaggcagattaacattactgttttggattctaaaaggtctatcatcactactagaacgcatattccaccttggatttacgttttgttagccgtattagggtggaacgaattcgtggctgtcataagaaaccccttatttgtaacccttaccttgatcttaggtgcaaccttttttgttattcataagttcggcctctggggccctgttgttaatgttgttcaaagtgcagttggtgaaacaagaactgcaataaaggataaattgaggcaatttgtcgttgaagatcatgaagtgaaggaatcttttgaaatgaaagatttctccaaaaacgagcaaaaagaaaaatga

SEQ ID NO: 10453 - DNA, 1377 bp, Saccharomyces cerevisiae
atgaccgatgagaaacgagcttttccaaaaggtaacaaccatataagatcagaaactttcaatggttcggtatctcacaaaatctccgaatcgattaaagatatcgctagcttaagaccacacggtaaatatacggtacaagacatcgacaacatcatagcatccacatcttcacatgaaaatagaggccaatcaggcgatagtaatggctgtataaatcacgacgaagaaggcgatattccgatgtgtgacttgaatgatgaaagcgacgttgaaatgatttctgaatatctttctagccagagggagatggaagcacaatctgtcgctaattatatgccaaaaatcaatgacgatttaccgctgttaaatccacctactttgaaaactgcctttgtagtcgacaccaactttattatttcgcatctaaacactttagaaaaattgagatcactgtccagcacttatcatcatttgattattgtaccaaccaccgtaatccaagaactggacggactaaaaaagagccctgatattgctagggacaatgacgatacaactaatcaggaacatgataggacaataggcacattggccagatgggggaacgactggatttataagaatctagccaatttagattccggtttaataggtcaaaaattgaaacaaagcttgaatccaggcagtttaaaggatgactcgatattggactgttgcttgtacttcaaagagattttaaattgttttgttattttgctttcgaatgataagaatctttgtacaaaggcattaactgaagatatattaactgtttcatttaggaagaacatggatgcgaaaataattgcaatgagagcatatgaagaaaaccaactgagatttgctaatctgcgtgactctacagtaaataatttcgatcagaatgtcacatcatatgctcatattcctggaatagaaacgccccctttgcaattcgataaagtctcacaaaatgtgtttgagcaagtaaaagaaactattttctttgctattgaccacactttaagaaaggaatatggtgaagatattggattcatagattacaacccagataaattaactaccatagaaaacgcttcgaattacatttatttgttttgggtgtctgtattttcggaacttttcacttgttcaaagataaagaagaatgagtggaagagcttaccaacagttttgaaatcaaaaccgacaaatctgaatgacttaagaacatttgaacaattttgggagactgtattgcattttttattcagcaaattcacaaatgaggagaaacaatctttagagaaacagattcatgaatggaaaacatctatcaatgctatatcaacctga

SEQ ID NO: 10454 - DNA, 1377 bp, Artificial Sequence
  Description of Artificial Sequence: Synthetic polynucleotide
atgaccgatgagaaaagagcttttccaaaaggtaacaaccatataagaagtgaaactttcaatggttctgtatctcacaaaatctccgaaagtattaaagatatcgctagcttaagaccacacggtaaatatacggtacaagacatcgacaacatcatagcatccacatcttctcatgaaaatagaggccaaagtggcgatagtaatggctgtataaatcacgacgaagaaggcgatattccgatgtgtgacttgaatgatgaaagcgacgttgaaatgatttctgaatatctttctagccagagggagatggaagcacaatctgtcgctaattatatgccaaaaatcaatgacgatttaccgttgttaaatccacctactttgaaaactgcctttgtagtcgacaccaactttattatttctcatttgaacactttagaaaaattgagatctttatccagcacttatcatcatttgattattgtaccaaccaccgtaatccaagaattagacggattgaaaaagagccctgatattgctagggacaatgacgatacaactaatcaggaacatgataggacaataggcacattggccagatgggggaacgactggatttataagaatttggccaatttagattccggtttaataggtcaaaaattgaaacaaagcttgaatccaggcagtttaaaggatgacagtatattggactgttgcttgtacttcaaagagattttaaattgttttgttattttgctttctaatgataagaatctttgtacaaaggcattaactgaagatatattaactgtttcttttaggaagaacatggatgcgaaaataattgcaatgagagcatatgaagaaaaccaattgagatttgctaatttacgtgactctacagtaaataatttcgatcagaatgtcacatcttatgctcatattcctggaatagaaacgccccctttgcaattcgataaagtctctcaaaatgtgtttgagcaagtaaaagaaactattttctttgctattgaccacactttaagaaaggaatatggtgaagatattggattcatagattacaacccagataaattaactaccatagaaaacgcttctaattacatttatttgttttgggtgtctgtattttctgaacttttcacttgttccaagataaagaagaatgagtggaagagcttaccaacagttttgaaatctaaaccgacaaatttgaatgacttaagaacatttgaacaattttgggagactgtattgcattttttattcagcaaattcacaaatgaggagaaacaatctttagagaaacagattcatgaatggaaaacatctatcaatgctatatctacctga

SEQ ID NO: 10455 - DNA, 204 bp, Saccharomyces cerevisiae
atggataacaaaaccccagtcactttagccaaggtcatcaaagttttaggaagaaccggttctcgtggtggtgtcacccaagtccgtgtcgaattcttggaagacacttccagaactattgtcagaaacgtgaagggcccagttagagaaaacgacattttggttctaatggaatctgaacgtgaagctcgtcgtttgcgttag

SEQ ID NO: 10456 - DNA, 204 bp, Artificial Sequence
  Description of Artificial Sequence: Synthetic polynucleotide
atggataacaaaaccccagtcactttagccaaggtcatcaaagttttaggaagaaccggttctcgtggtggtgtcacccaagtccgtgtcgaattcttggaagacacttccagaactattgtcagaaacgtgaagggcccagttagagaaaacgacattttggttttgatggaatctgaacgtgaagctcgtcgtttgcgttga

SEQ ID NO: 10457 - DNA, 2430 bp, Saccharomyces cerevisiae
atgtcttctgtagaagaattgactcagctgttttcacaggttgggtttgaagataaaaaggtgaaggagattgtcaagaataaaaaggtttctgattcactttacaaattgattaaggagactccttcggactatcaatggaacaaatctactagagcgctagtacacaacctggcatcttttgtcaaaggtacagatctacccaagtctgaattaattgttaacggcatcattaatggtgatttgaagacatctctgcaagtcgatgccgcatttaaatatgtaaaggctaatggcgaggcatccaccaaaatgggtatgaatgaaaactctggtgttggtattgagattacagaggatcaggttagaaattacgtcatgcagtacattcaagaaaacaaggaaagaattttaactgaacgctataaactggtgccaggtatttttgccgatgttaaaaacttaaaggagctgaagtgggccgatccacgtagtttcaagccaattatcgaccaagaagtcttaaaacttttgggtccaaaggatgagagagacttaatcaagaagaagaccaagaataatgaaaagaagaaaaccaattctgccaagaagagttctgataattctgcatcatccggtccaaagaggactatgttcaatgaaggtttcctaggtgatttgcataaagtgggtgaaaacccacaagcttacccagaattaatgaaggaacaccttgaggttactggtggcaaagttcgtacaaggttccctccggagcccaatggatatttgcatattggtcattctaaagctattatggttaattttggctatgctaaatatcacaatggtacctgttatttaagatttgacgataccaaccccgaaaaggaagctcctgaatattttgaatccattaagagaatggtttcttggttaggttttaaaccatggaaaattacttactcaagtgattattttgacgagctttatcgcctcgctgaagtgttgatcaaaaacggcaaagcttacgtttgtcattgtaccgccgaagaaattaaaagaggtcgtggtattaaagaagacggtactccaggtggggagagatatgcttgtaagcatcgtgatcagtcgatagaacaaaacctgcaagaattcagagatatgagagatggcaagtacaaacctggtgaagctatcttaagaatgaaacaggatctaaattcaccaagcccacaaatgtgggacttgattgcgtatagagttttaaatgctccacatccaagaacgggaacaaaatggagaatttatcctacttacgattttacacattgtttggtcgattcaatggaaaatattacacattctttatgtactactgaattctacctatctagagaaagctatgaatggttatgtgatcaggttcatgtgttcagacccgctcaaagagaatatggtcgtttgaatatcaccggtacagttttatccaaaagaaaaattgcgcaattggtggatgaaaaattcgttagaggctgggacgatcctagactattcacgcttgaagctatacgcagacgtggtgttcctcctggtgccattttatcctttatcaacacattaggtgttaccacaagtaccacaaacattcaagttgtgaggtttgagagcgctgttagaaagtacctagaagataccacaccgagattaatgtttgtgttggatcctgttgaagttgttgtcgataatttatctgacgattatgaagaattggcaactattccttacagacctggtactccagaatttggtgaaagaactgtaccatttacaaacaaattctacattgaaaggtcagatttctcagaaaacgttgatgataaggaatttttcagattaacaccaaaccaaccagttggtttaattaaagtctcacacacagtttctttcaaaagtttggaaaaagatgaagctggtaaaattataagaattcatgtcaactatgataacaaggttgaagaaggttcgaaaccaaagaaaccaaaaacttatattcaatgggttcctatctcttcaaaatataattctccattgagagttactgaaactagggtttacaaccaattgttcaaatctgaaaatccatcttctcatcctgaaggcttcttgaaggacatcaacccagaaagtgaagtcgtttataaagaatctgtcatggaacataacttcggggacgttgtcaagaacagtccatgggtcgttgattctgttaaaaactcggaattttatgttgaagaagataaggattccaaagaagtgtgtagattccaagctatgagagtaggttatttcactctggataaagagagtacgacttctaaggttattttgaatagaatagttagcttgaaggacgcaacttccaagtga

SEQ ID NO: 10458 - DNA, 2430 bp, Artificial Sequence
  Description of Artificial Sequence: Synthetic polynucleotide
atgtcttctgtagaagaattgactcagttattttcccaggttgggtttgaagataaaaaggtgaaggagattgtcaagaataaaaaggtttctgattctctttacaaattgattaaggagactccttctgactatcaatggaacaaatctactagagcgttggtacacaacttggcatcttttgtcaaaggtacagatttgcccaagtctgaattaattgttaacggcatcattaatggtgatttgaagacatctttacaagtcgatgccgcatttaaatatgtaaaggctaatggcgaggcatccaccaaaatgggtatgaatgaaaactctggtgttggtattgagattacagaggatcaggttagaaattacgtcatgcagtacattcaagaaaacaaggaaagaattttaactgaacgctataaattagtgccaggtatttttgccgatgttaaaaacttaaaggagttgaagtgggccgatccacgtagtttcaagccaattatcgaccaagaagtcttaaaacttttgggtccaaaggatgagagagacttaatcaagaagaagaccaagaataatgaaaagaagaaaaccaattctgccaagaagagttctgataattctgcatcttccggtccaaagaggactatgttcaatgaaggtttcttgggtgatttgcataaagtgggtgaaaacccacaagcttacccagaattaatgaaggaacaccttgaggttactggtggcaaagttcgtacaaggttccctccggagcccaatggatatttgcatattggtcattctaaagctattatggttaattttggctatgctaaatatcacaatggtacctgttatttaagatttgacgataccaaccccgaaaaggaagctcctgaatattttgaatccattaagagaatggtttcttggttaggttttaaaccatggaaaattacttactctagtgattattttgacgagctttatcgcctcgctgaagtgttgatcaaaaacggcaaagcttacgtttgtcattgtaccgccgaagaaattaaaagaggtcgtggtattaaagaagacggtactccaggtggggagagatatgcttgtaagcatcgtgatcagagtatagaacaaaacttacaagaattcagagatatgagagatggcaagtacaaacctggtgaagctatcttaagaatgaaacaggatttgaattctccaagcccacaaatgtgggacttgattgcgtatagagttttaaatgctccacatccaagaacgggaacaaaatggagaatttatcctacttacgattttacacattgtttggtcgattctatggaaaatattacacattctttatgtactactgaattctacttgtctagagaaagctatgaatggttatgtgatcaggttcatgtgttcagacccgctcaaagagaatatggtcgtttgaatatcaccggtacagttttatccaaaagaaaaattgcgcaattggtggatgaaaaattcgttagaggctgggacgatcctagattattcacgcttgaagctatacgcagacgtggtgttcctcctggtgccattttatcctttatcaacacattaggtgttaccacaagtaccacaaacattcaagttgtgaggtttgagagcgctgttagaaagtacttggaagataccacaccgagattaatgtttgtgttggatcctgttgaagttgttgtcgataatttatctgacgattatgaagaattggcaactattccttacagacctggtactccagaatttggtgaaagaactgtaccatttacaaacaaattctacattgaaaggtctgatttctctgaaaacgttgatgataaggaatttttcagattaacaccaaaccaaccagttggtttaattaaagtctcccacacagtttctttcaaaagtttggaaaaagatgaagctggtaaaattataagaattcatgtcaactatgataacaaggttgaagaaggttccaaaccaaagaaaccaaaaacttatattcaatgggttcctatctcttctaaatataattctccattgagagttactgaaactagggtttacaaccaattgttcaaatctgaaaatccatcttctcatcctgaaggcttcttgaaggacatcaacccagaaagtgaagtcgtttataaagaatctgtcatggaacataacttcggggacgttgtcaagaacagtccatgggtcgttgattctgttaaaaactctgaattttatgttgaagaagataaggattccaaagaagtgtgtagattccaagctatgagagtaggttatttcactttagataaagagagtacgacttctaaggttattttgaatagaatagttagcttgaaggacgcaacttccaagtga

SEQ ID NO: 10459 - DNA, 1875 bp, Saccharomyces cerevisiae
atggtggtgcagaaaaaacttagggctatcttgaccgatgaaggtgtattgatcaaatcgcaatcacaccatatgttcaataagcatggtcaactcagaagcggagattctttatccttgttgagctgcttgtcctgtctggatgatggaactttgagctctgatggaggttcttttgatgaggatgattccctggaactgttgcctcttaatactaccattccgttcaacagaattttgaacgcaaaatatgtgaatgtcggtcagaaaggcttcaataatggcaaaatttcttcgaatccttttcaaacggaaaatctgagttcttcgtctgaaaatgacgacgttgagaatcatagtttgagcaatgataaggctcctgtaagcgaatcacagtcatttcccaaaaaagacaagtgggatacaaaaacgaacactgtgaaggtgtctcccgatgattcacaggataactcaccatctttagggataaaagataatcaacagttaattgagttaacttttgctgtacccaagggccatgatgttataccacaaaaattaaccttgttaatagatcacgtttctaggaaatcgagagcaaataccggagaggagaacatttcttctggtactgtggaagaaatcctggaaaaaagttatgaaaattccaagagaaacagatcgatattagtcattattaatccccacggtggtaaaggtactgctaaaaatttattcctgacaaaagcaaggccaatactagtggaaagtggctgcaaaatagaaattgcatacacaaaatatgcccgtcacgccatcgatattgccaaagatttagatatcagcaaatacgataccattgcatgtgcctcgggtgatggtattccatacgaagtaattaatgggctttatagaagacccgacagagtggatgcgttcaataaactagccgtaactcagctaccttgcggttcaggaaatgctatgagcatttcatgtcattggacaaataacccatcgtacgccgctctgtgccttgtcaaatccattgaaacaagaatagacttaatgtgttgttcccaaccttcttatatgaacgaatggccaagattatcctttttgagtcagacgtacggcgttattgcagaatctgatattaacactgaattcatcagatggatgggtcccgttaggtttaatttgggtgtagcattcaacattatccaaggtaagaaatatccctgcgaagttttcgtcaaatatgctgccaaatctaaaaaggaattaaaagttcatttcttagaaaataaagataaaaacaaaggatgtttaaccttcgaaccaaatcctagcccaaactcttcgccggatttactatctaaaaacaatatcaacaacagtacaaaagatgaactttcaccgaattttctcaacgaggacaactttaaattaaagtatccgatgacggaaccagtacctagagactgggagaaaatggattcagagctaactgataacttaacaatcttttacacagggaaaatgccgtatattgctaaggacaccaaattttttcccgctgctttaccagcggatggtaccattgatttagtcataacggatgcaagaatcccagtgacaagaatgacaccaattttattatccttggataaaggttctcatgtattagagccagaagttattcactcaaaaatattggcttataagattataccaaaagtggagtcaggtttattttcagtggatggtgaaaagtttcctttggaacccttgcaagtggaaataatgcccatgttatgcaagacgttgctaaggaatggtagatatatcgatacagagtttgaatccatgtag

SEQ ID NO: 10460 - DNA, 1875 bp, Artificial Sequence
  Description of Artificial Sequence: Synthetic polynucleotide
atggtggtgcagaaaaaacttagggctatcttgaccgatgaaggtgtattgatcaaatctcaatctcaccatatgttcaataagcatggtcaactcagaagcggagattctttatccttgttgagctgcttgtcctgtttggatgatggaactttgagctctgatggaggttcttttgatgaggatgattccttagaattattgcctcttaatactaccattccgttcaacagaattttgaacgcaaaatatgtgaatgtcggtcagaaaggcttcaataatggcaaaatttcttccaatccttttcaaacggaaaatttgagttcttcttctgaaaatgacgacgttgagaatcatagtttgagcaatgataaggctcctgtaagcgaatctcagtcttttcccaaaaaagacaagtgggatacaaaaacgaacactgtgaaggtgtctcccgatgattctcaggataactctccatctttagggataaaagataatcaacagttaattgagttaacttttgctgtacccaagggccatgatgttataccacaaaaattaaccttgttaatagatcacgtttctaggaaatctagagcaaataccggagaggagaacatttcttctggtactgtggaagaaatcttggaaaaaagttatgaaaattccaagagaaacagaagtatattagtcattattaatccccacggtggtaaaggtactgctaaaaatttattcttaacaaaagcaaggccaatattggtggaaagtggctgcaaaatagaaattgcatacacaaaatatgcccgtcacgccatcgatattgccaaagatttagatatcagcaaatacgataccattgcatgtgcctctggtgatggtattccatacgaagtaattaatgggctttatagaagacccgacagagtggatgcgttcaataaattggccgtaactcagttgccttgcggttctggaaatgctatgagcattagttgtcattggacaaataacccatcttacgccgctctttgccttgtcaaatccattgaaacaagaatagacttaatgtgttgttcccaaccttcttatatgaacgaatggccaagattatcctttttgagtcagacgtacggcgttattgcagaatctgatattaacactgaattcatcagatggatgggtcccgttaggtttaatttgggtgtagcattcaacattatccaaggtaagaaatatccctgcgaagttttcgtcaaatatgctgccaaatctaaaaaggaattaaaagttcatttcttagaaaataaagataaaaacaaaggatgtttaaccttcgaaccaaatcctagcccaaactcttctccggatttattatctaaaaacaatatcaacaacagtacaaaagatgaactttctccgaattttctcaacgaggacaactttaaattaaagtatccgatgacggaaccagtacctagagactgggagaaaatggattctgagttaactgataacttaacaatcttttacacagggaaaatgccgtatattgctaaggacaccaaattttttcccgctgctttaccagcggatggtaccattgatttagtcataacggatgcaagaatcccagtgacaagaatgacaccaattttattatccttggataaaggttctcatgtattagagccagaagttattcactctaaaatattggcttataagattataccaaaagtggagtctggtttattttctgtggatggtgaaaagtttcctttggaacccttgcaagtggaaataatgcccatgttatgcaagacgttgttgaggaatggtagatatatcgatacagagtttgaatccatgtga

SEQ ID NO: 10461 - DNA, 2361 bp, Saccharomyces cerevisiae
atgagtaagcggggtagtttacaggatagagcttccccatcggaggaaactgtaaagaaggcgcagaagagacggaaaccaataaagtcatgcgctttttgtaggaaaaggaaattacgttgcgaccagcagaagccaatgtgctcaacttgtaagacgaggggtcgttctggttgcctgtatacagagaaattcacccacaaaatagaaacaaaagagttatttggcagtactccgaacattgaactgttgaaaaggattgaggatttagagaaaagactagatgacaaagagttgacggagaaggatgtagcgcttagtacgagcccatttaggaacccttacgctaatttttactatttacaatgtaaaggctcgggaagaagaatagtatatggtcctacatctttgagaacgcatctctcaaacgatgataatcggtttgtaaacacgtataatcagctctggtccaaagtgaaaatcgagagaaacagatggaaggctaggcataaatggacaatgaagccagaaactcaactcctagagggaccgccgttagaaaagacaggctctgacatcttgcaacaggtttgtaacgttttgccatcttttgaacaatcgtcaaagattataacagactttttcaatactgaactggaaactaatgaagttagtgaagtattagataaaaccaaaataataaacgatttcacttcctcgtttcttccaagtgacgaactgttacccaacggtgaaaggcggattgaaaagttattaccatcgacaaagaaaaactattataagattggagttattttgatgatactgtgtattcgccatttctacaaaaatactccggaagagatagagaaatttctcatcatgctgacgggactgtcaacagctaaagtatatttcattgaacgcgctcaatttctcttattgaaatactatcatcgagaactaatttgggcgtgtggagacgattcgcatatgattagtctagttgacttattatgcagcacggcaattatgctgggtttacacttgaatataagagaaatatacaaaaatcaagaaaatattgtggggagtatggaaagtttggaaaatttgtgggtttggattatattatcagatttcaatgtttctttaaatattgggagatgtttggcgattaactcatcctattttcaagtcgatgaatgcgagaatggtgagaggttgcctaaaaatacaaacaattattcatcgacggtttttttcgatcagtcaaattcctgcatgggcaagcttaaaaggtttttaagattagctcgaccaatgctagatcaaatttatgatagaagcgcatttccagacttagccgaaaattgtaaaaaactaagaaactttgtagagactgaattccacccaatatcatattacactgacagtgagttaatatctaaagttcctttgtgcgagattaaagtgcttgcgcaggttttgaatttgttgttgacgttttattccttgaggtatttgatttacaaggaaaaaagcgttgttttagagaacaacatcctgcaaaccattttggtctctttttcccttgtcatcaatacgaccatactgtgttttaacctagatgagaagcattttcctgagttttttgatcataattgcgttcatttaccgccatttatggccttgtctttagtatacacaaatttcctttttcctagggcctctactggcttttgtgcgtttttgtatcataagttaactctttttgagaagggctattatctatcatccaacatcaaagatcaagaagtcacagattgggatttgtcaaccttgaatatcccgttggataaagctatgaacttacttactgctttcaaaatacattcagatatatttgctaaatggtctaatgataacaacaagcagttaagaattattatggctcgctcttatacatttgttatcaacatcgccctggaaagcatatatagagctgttttggaaaaagtaatcaaatatagaaccgaggtcgaaaacacatggttacaacaactccaagacgaattgaatgggtcctattcgctcactgacaatgtaaatactccaatcgatcccagtttaagtgacctgggcgtcacaagcgccagtccattggcgggaaattctccaggattacccccggaggaagtgcgaaataacagcgaaaacgcttcgcataacaatgaaactgggccaattgagactgaactggcacagacaatatccaacgaattttggacggcgtacaaccttggctgggaggaactaatgagtcagccagattataaatatttatttgatacgcagtag

SEQ ID NO: 10462 - DNA, 2361 bp, Artificial Sequence
  Description of Artificial Sequence: Synthetic polynucleotide
atgagtaagagaggtagtttacaggatagagcttccccaagtgaggaaactgtaaagaaggcgcagaagagaagaaaaccaataaagtcttgcgctttttgtaggaaaaggaaattacgttgcgaccagcagaagccaatgtgctctacttgtaagacgaggggtcgttctggttgcttatatacagagaaattcacccacaaaatagaaacaaaagagttatttggcagtactccgaacattgaattattgaaaaggattgaggatttagagaaaagattagatgacaaagagttgacggagaaggatgtagcgcttagtacgagcccatttaggaacccttacgctaatttttactatttacaatgtaaaggcagtggaagaagaatagtatatggtcctacatctttgagaacgcatctctccaacgatgataatagatttgtaaacacgtataatcagctctggtccaaagtgaaaatcgagagaaacagatggaaggctaggcataaatggacaatgaagccagaaactcaactcttggagggaccgccgttagaaaagacaggctctgacatcttgcaacaggtttgtaacgttttgccatcttttgaacaatcttccaagattataacagactttttcaatactgaattggaaactaatgaagttagtgaagtattagataaaaccaaaataataaacgatttcacttcctcttttcttccaagtgacgaattattacccaacggtgaaaggagaattgaaaagttattaccatctacaaagaaaaactattataagattggagttattttgatgatattatgtattcgccatttctacaaaaatactccggaagagatagagaaatttctcatcatgcttacgggattatctacagctaaagtatatttcattgaacgcgctcaatttctcttattgaaatactatcatagagaattgatttgggcgtgtggagacgattctcatatgattagtttggttgacttattatgcagcacggcaattatgttgggtttacacttgaatataagagaaatatacaaaaatcaagaaaatattgtggggagtatggaaagtttggaaaatttgtgggtttggattatattaagtgatttcaatgtttctttaaatattgggagatgtttggcgattaactcttcctattttcaagtcgatgaatgcgagaatggtgagaggttgcctaaaaatacaaacaattattcttctacggtttttttcgatcagtctaattcctgcatgggcaagcttaaaaggtttttaagattagctagaccaatgcttgatcaaatttatgatagaagcgcatttccagacttagccgaaaattgtaaaaaattgagaaactttgtagagactgaattccacccaatatcttattacactgacagtgagttaatatctaaagttcctttgtgcgagattaaagtgcttgcgcaggttttgaatttgttgttgacgttttattccttgaggtatttgatttacaaggaaaaaagcgttgttttagagaacaacatcttgcaaaccattttggtctctttttcccttgtcatcaatacgaccatattatgttttaaccttgatgagaagcattttcctgagttttttgatcataattgcgttcatttaccgccatttatggccttgtctttagtatacacaaatttcctttttcctagggcctctactggcttttgtgcgtttttgtatcataagttaactctttttgagaagggctattatttatcttccaacatcaaagatcaagaagtcacagattgggatttgtccaccttgaatatcccgttggataaagctatgaacttacttactgctttcaaaatacattctgatatatttgctaaatggtctaatgataacaacaagcagttaagaattattatggctcgctcttatacatttgttatcaacatcgccttggaaagcatatatagagctgttttggaaaaagtaatcaaatatagaaccgaggtcgaaaacacatggttacaacaactccaagacgaattgaatgggtcctattccctcactgacaatgtaaatactccaatcgatcccagtttaagtgacttgggcgtcacaagcgccagtccattggcgggaaattctccaggattacccccggaggaagtgagaaataacagcgaaaacgcttctcataacaatgaaactgggccaattgagactgaattggcacagacaatatccaacgaattttggacggcgtacaaccttggctgggaggaattgatgagtcagccagattataaatatttatttgatacgcagtga

SEQ ID NO: 10463 - DNA, 1062 bp, Saccharomyces cerevisiae
atgggttcccaagatttagctagtttaattgggaggtttaaatacgtcagggtgttagattcgaaccctcatacaaaggtaatctcactactaggcagcatagatgggaaggatgccgtgttaactgctgaaaagacgcatttcatatttgatgaaacggtacgtagaccctctcaaagtggccgtagcactccgattttctttcatcgtgaaatagacgagtactcctttttaaacggtattactgatctgaaggaattaacttcgaatgacatctactactgggggttgtctgttttgaagcagcatattttgcataacccaactgcgaaggttaacttaatttggcccgcctcgcagttccacatcaagggatacgaccagcaggatttacatgtcgtcagagaaactcctgatatgtatagaaacatagttgtgccctttatccaagagatgtgtaccagcgaaagaatgaaatgggtaaacaacattctttacgagggcgccgaggatgatagagttgtttataaggaatacagtagcaggaataaagaggatggattcgtcatcttgcccgatatgaagtgggacggaatcaacattgattcgttatacctggtcgcgatcgtgtacagggacgacatcaaatctttgagagatttgaacccaaaccatagagattggttaattagactcaataagaagattaagaccatcatcccccagcactatgactataatgtaaacccggacgagctaagagttttcattcattatcaaccttcatattaccattttcatgtccatatagtgaatataaggcatccaggagtaggcgaggagagaggctccggaatgacaatactgttggaagatgttatagaagcgttgggtttcttaggtcctgaaggttatatgaagaagacgcttacttatgtcattggtgaaaatcatgatttatggaaaaagggctttaaggaagaagttgaaaagcaactgaagcatgatggtatcgcaaccagtcctgaaaaaggctctgggttcaataccaatttgggttga

SEQ ID NO: 10464 - DNA, 1062 bp, Artificial Sequence
  Description of Artificial Sequence: Synthetic polynucleotide
atgggttcccaagatttagctagtttaattgggaggtttaaatacgtcagggtgttagattccaaccctcatacaaaggtaatctctttattaggcagcatagatgggaaggatgccgtgttaactgctgaaaagacgcatttcatatttgatgaaacggtacgtagaccctctcaaagtggccgtagcactccgattttctttcatcgtgaaatagacgagtactcctttttaaacggtattactgatttgaaggaattaacttccaatgacatctactactgggggttgtctgttttgaagcagcatattttgcataacccaactgcgaaggttaacttaatttggcccgcctctcagttccacatcaagggatacgaccagcaggatttacatgtcgtcagagaaactcctgatatgtatagaaacatagttgtgccctttatccaagagatgtgtaccagcgaaagaatgaaatgggtaaacaacattctttacgagggcgccgaggatgatagagttgtttataaggaatacagtagcaggaataaagaggatggattcgtcatcttgcccgatatgaagtgggacggaatcaacattgattctttatacttagtcgcgatcgtgtacagggacgacatcaaatctttgagagatttgaacccaaaccatagagattggttaattagactcaataagaagattaagaccatcatcccccagcactatgactataatgtaaacccggacgagttaagagttttcattcattatcaaccttcttattaccattttcatgtccatatagtgaatataaggcatccaggagtaggcgaggagagaggctccggaatgacaatattattggaagatgttatagaagcgttgggtttcttaggtcctgaaggttatatgaagaagacgcttacttatgtcattggtgaaaatcatgatttatggaaaaagggctttaaggaagaagttgaaaagcaattgaagcatgatggtatcgcaaccagtcctgaaaaaggctctgggttcaataccaatttgggttga

SEQ ID NO: 10465 - DNA, 855 bp, Saccharomyces cerevisiae
atgtctgtccaagatactaaagcggtagagttttctatgggtcacatcagatcatcctctgtatccctggtagcagaggctacttcaaacacgaatagtgaagacaaattatctaaggtccaactctacgaagatttgtgccggtacgaggatacattgagtaagttggtggaatctgtagatcgtttcaaaccaaaccttgatattgccaaggatttgatcagaactgatgaggccttgtttgaaaacgtcaaactgttagctgaatatgacaatatctaccgcaacttacagaagattgacaaagactctgaagaactagattctaaaaccaggaagatattggaaattctaaatgaatgtcatgacgagttaaaagcactaccgatgcttgaacaagtagagttcgagaaaaacacaattttacagcaaagatcgaaaatcaattcgacagagttgttggattatgccaccaaactctccaagtttaccaaaataccaccaacgttcgacaagggagctgtgggacccaacaattttatatggcccgcagaggatgccctacgaagaggaatgcttgctatggcctcattacatagtaaagagctaactagaatacccggtgaagaagtagaagaaacagaagtaccgaccgtaccgccatctcaaagtgaagaacaaaaagggcagatggccaagaaagaaggtacaccaaagacagactcgtttatatttgatggtactgctaaagaagttggtgatgaggcagacaataccaaagataaagaaaaggaagaaaataatgatgatgccctagatcttgatcttgatctgtttgatccggacgacttctag

SEQ ID NO: 10466 - DNA, 855 bp, Artificial Sequence
  Description of Artificial Sequence: Synthetic polynucleotide
atgtctgtccaagatactaaagcggtagagttttctatgggtcacatcagaagttcctctgtatccttagtagcagaggctacttctaacacgaatagtgaagacaaattatctaaggtccaactctacgaagatttgtgcaggtacgaggatacattgagtaagttggtggaatctgtagatcgtttcaaaccaaaccttgatattgccaaggatttgatcagaactgatgaggccttgtttgaaaacgtcaaattattagctgaatatgacaatatctaccgcaacttacagaagattgacaaagactctgaagaattagattctaaaaccaggaagatattggaaattttgaatgaatgtcatgacgagttaaaagcattaccgatgcttgaacaagtagagttcgagaaaaacacaattttacagcaaagaagtaaaatcaattctacagagttgttggattatgccaccaaactctccaagtttaccaaaataccaccaacgttcgacaagggagctgtgggacccaacaattttatatggcccgcagaggatgccttaagaagaggaatgcttgctatggcctctttacatagtaaagagttaactagaatacccggtgaagaagtagaagaaacagaagtaccgaccgtaccgccatctcaaagtgaagaacaaaaagggcagatggccaagaaagaaggtacaccaaagacagactcttttatatttgatggtactgctaaagaagttggtgatgaggcagacaataccaaagataaagaaaaggaagaaaataatgatgatgccttggatcttgatcttgatttatttgatccggacgacttctga

SEQ ID NO: 10467 - DNA, 1860 bp, Saccharomyces cerevisiae
atgtacaatcctgtggacgctgttttaacaaagataattaccaactatgggattgatagttttacactgcgatatgctatctgcttattgggatcgttcccactgaatgctattttgaagagaattcccgagaagcgtataggtttaaaatgttgttttatcatttctatgtcgatgttttacttattcggtgtgctgaatctagtaagtggattcaggaccctgtttattagtaccatgtttacttacttgatctcaagattttaccgttccaagtttatgccacacttgaatttcatgtttgttatgggtcatttggcaataaatcatatacacgcccaattccttaacgaacagactcaaactaccgttgacattacaagttcacaaatggttttagccatgaaactaacttcttttgcatggtcgtactatgatggttcatgcactagcgaaagcgatttcaaagatttgactgagcatcaaaaatctcgtgctgtcagaggtcatccacccttattaaagttcctggcatatgcatttttctattcaacgttgctaactggcccaagtttcgattatgccgattttgacagctggttgaattgtgagatgttccgtgacttgcctgaaagcaaaaagcctatgagaagacaccaccctggtgaaagaagacagattccaaagaatggtaaacttgcattatggaaagttgttcaaggtcttgcttggatgattttaagtacactaggaatgaagcacttccccgtaaaatacgttttggacaaagatggcttcccaacgagatcttttatattcagaatccattacttattcttgcttggtttcatccatagattcaagtactacgctgcctggactatttcggaaggatcttgtattttgtgcggtttgggttataatggttatgattcaaagacacaaaagatcagatgggatcgtgtcagaaatattgacatttggaccgtagaaacggcgcagaatacgcgtgaaatgttggaagcatggaatatgaatactaacaagtggctaaaatactctgtttatttacgtgtcacaaagaagggcaaaaaacctggtttccgctcaactttgtttactttcctaacttccgcattttggcatggtaccagacctgggtactatctgacttttgcgacaggggctttgtaccaaacatgtggtaaaatctacagacgcaattttagaccaattttcttgcgagaagatggtgtcactcctttgccttctaaaaaaatctacgatttagttggcatatatgcaattaaactagcatttggttacatggtgcaaccatttattatccttgatttgaagccatctttaatggtatggggctctgtttatttctatgttcatattattgttgctttctcatttttcctattcagaggaccatatgctaaacaagttactgaattttttaaatccaaacaacctaaagaaatattcattagaaaacaaaagaagttggaaaaagatatttctgcaagctctccaaacttgggtggtatattgaaggcaaagattgaacatgaaaagggaaagacagcagaagaagaagaaatgaacttaggtattccaccaattgagttagaaaagtgggacaatgctaaggaagattgggaagatttctgcaaagattacaaagaatggagaaataaaaatggtcttgaaatagaagaggaaaacctttctaaagcttttgaaagattcaagcaggaattttctaacgctgcaagtggatcaggtgaacgtgtgagaaaaatgagttttagtggttactcaccaaagcctatttcaaaaaaggaagagtag

SEQ ID NO: 10468 - DNA, 1860 bp, Artificial Sequence
  Description of Artificial Sequence: Synthetic polynucleotide
atgtacaatcctgtggacgctgttttaacaaagataattaccaactatgggattgatagttttacattgagatatgctatctgcttattgggaagtttcccattgaatgctattttgaagagaattcccgagaagcgtataggtttaaaatgttgttttatcatttctatgtccatgttttacttattcggtgtgttgaatttggtaagtggattcaggaccttatttattagtaccatgtttacttacttgatctccagattttaccgttccaagtttatgccacacttgaatttcatgtttgttatgggtcatttggcaataaatcatatacacgcccaattccttaacgaacagactcaaactaccgttgacattacaagttctcaaatggttttagccatgaaattaacttcttttgcatggagttactatgatggttcttgcactagcgaaagcgatttcaaagatttgactgagcatcaaaaatctcgtgctgtcagaggtcatccacccttattaaagttcttggcatatgcatttttctattctacgttgttgactggcccaagtttcgattatgccgattttgacagctggttgaattgtgagatgttccgtgacttgcctgaaagcaaaaagcctatgagaagacaccaccctggtgaaagaagacagattccaaagaatggtaaacttgcattatggaaagttgttcaaggtcttgcttggatgattttaagtacattaggaatgaagcacttccccgtaaaatacgttttggacaaagatggcttcccaacgagatcttttatattcagaatccattacttattcttgcttggtttcatccatagattcaagtactacgctgcctggactatttctgaaggatcttgtattttgtgcggtttgggttataatggttatgattctaagacacaaaagatcagatgggatcgtgtcagaaatattgacatttggaccgtagaaacggcgcagaatacgcgtgaaatgttggaagcatggaatatgaatactaacaagtggttgaaatactctgtttatttacgtgtcacaaagaagggcaaaaaacctggtttccgctccactttgtttactttcttgacttccgcattttggcatggtaccagacctgggtactatttgacttttgcgacaggggctttgtaccaaacatgtggtaaaatctacagacgcaattttagaccaattttcttgagagaagatggtgtcactcctttgccttctaaaaaaatctacgatttagttggcatatatgcaattaaattggcatttggttacatggtgcaaccatttattatccttgatttgaagccatctttaatggtatggggctctgtttatttctatgttcatattattgttgctttctcctttttccttttcagaggaccatatgctaaacaagttactgaattttttaaatccaaacaacctaaagaaatattcattagaaaacaaaagaagttggaaaaagatatttctgcaagctctccaaacttgggtggtatattgaaggcaaagattgaacatgaaaagggaaagacagcagaagaagaagaaatgaacttaggtattccaccaattgagttagaaaagtgggacaatgctaaggaagattgggaagatttctgcaaagattacaaagaatggagaaataaaaatggtcttgaaatagaagaggaaaacctttctaaagcttttgaaagattcaagcaggaattttctaacgctgcaagtggatctggtgaacgtgtgagaaaaatgagttttagtggttactctccaaagcctatttccaaaaaggaagagtga

SEQ ID NO: 10469 - DNA, 1182 bp, Saccharomyces cerevisiae
atgctttccagaacaatccgtacacaaggttccttcctaagaagatcacaactgaccattacaagatcattttcggttacattcaacatgcagaatgcacaaaagagatcacccacaggaattgttttgatgaacatgggtggcccctctaaagttgaggaaacatatgattttttgtatcaattatttgccgataatgacctaattcccattagtgctaagtatcagaagacaattgctaaatatattgctaagtttcgtacccccaagatagagaagcaatatagggaaattggtgggggctccccaatccggaaatggtctgagtatcaagccactgaggtctgtaaaatcttagataaaacctgtccagaaacggcgcctcataagccttacgtggcgtttcgttacgcaaagccgctaaccgcagaaacttataaacaaatgctaaaagatggcgtgaagaaggcagtggccttttctcaatatcctcatttctcttattccactaccgggtcatccatcaacgaattgtggagacagattaaggcattggactccgagagatctatatcttggtcggttattgatcgttggcctacaaatgaaggtctaatcaaggccttctccgaaaatatcaccaaaaaactacaagagtttccgcaacctgtcagagacaaggttgttttattgttttccgcacattctctacccatggatgttgttaacaccggtgatgcctacccagctgaggtagctgcgacggtttacaacatcatgcaaaaattaaagtttaaaaacccttataggttggtttggcaatcccaagttggaccaaaaccatggttgggagcgcagacagctgaaattgcggaatttttaggccccaaagttgatggcctaatgtttattcctatcgcctttacctctgatcatattgaaacattgcatgaaattgacttaggcgtcattggggaatcggaatataaggataaatttaagagatgcgaatctttaaatggcaaccagacctttattgaaggcatggcagatctcgtcaaaagccacttacagagtaaccaactctattctaatcaactacctcttgattttgcacttggcaagtccaatgatcctgtaaaggacctttcattggtatttggcaatcacgaatctacttga

SEQ ID NO: 10470 - DNA, 1182 bp, Artificial Sequence
  Description of Artificial Sequence: Synthetic polynucleotide
atgctttccagaacaatccgtacacaaggttccttcttaagaagatctcaattgaccattacaagatctttttctgttacattcaacatgcagaatgcacaaaagagatctcccacaggaattgttttgatgaacatgggtggcccctctaaagttgaggaaacatatgattttttgtatcaattatttgccgataatgacttgattcccattagtgctaagtatcagaagacaattgctaaatatattgctaagtttcgtacccccaagatagagaagcaatatagggaaattggtgggggctccccaatcagaaaatggtctgagtatcaagccactgaggtctgtaaaatcttagataaaacctgtccagaaacggcgcctcataagccttacgtggcgtttcgttacgcaaagccgttaaccgcagaaacttataaacaaatgttgaaagatggcgtgaagaaggcagtggccttttctcaatatcctcatttctcttattccactaccgggtcttccatcaacgaattgtggagacagattaaggcattggactccgagagatctatatcttggtctgttattgatcgttggcctacaaatgaaggtttgatcaaggccttctccgaaaatatcaccaaaaaattacaagagtttccgcaacctgtcagagacaaggttgttttattgttttccgcacattctttacccatggatgttgttaacaccggtgatgcctacccagctgaggtagctgcgacggtttacaacatcatgcaaaaattaaagtttaaaaacccttataggttggtttggcaatcccaagttggaccaaaaccatggttgggagcgcagacagctgaaattgcggaatttttaggccccaaagttgatggcttaatgtttattcctatcgcctttacctctgatcatattgaaacattgcatgaaattgacttaggcgtcattggggaaagtgaatataaggataaatttaagagatgcgaatctttaaatggcaaccagacctttattgaaggcatggcagatctcgtcaaaagccacttacagagtaaccaactctattctaatcaattacctcttgattttgcacttggcaagtccaatgatcctgtaaaggacctttctttggtatttggcaatcacgaatctacttga

SEQ ID NO: 10471 - DNA, 1395 bp, Saccharomyces cerevisiae
atgccagaagatacaagctatagcaactccttcgaggattattacaacaattctcacgcgatttccccttacaaggattcattttacaaagaaatgacaccatctaagccaaatgtaaggtttggtgatgatgatgttaacatttttgatcaaagaaaaaaagtaaatgaaatcaacaagaataacaccgtcaaaaggtcgatcccatcatcgataagcaccactattacccccaacaagtctagcttaaagtcaccaaggggaaaaagggcttcgaagaattcttttgataatgaaactaagttagaatcgaaaaatgaaactctgaaagaggtcaatgacgcggttaaccgttgctatgcgctttgtaacattccaactaagcatgtatccataaatagtatttctgatttggcgcagacgttcgaaacgcttgctgtagggataacccatgaaacgaacagaaaagctgagtgtgaacggagcaagaatgcaatagattcactttactaccatgaacagctagaaaaaaaagaacttaatgaaaaaagccttcaaatggcaatcgatcacttgctgaaggtcacaaagcaaaatttgagacaagctgacgatggaaacaaactgaaagaaacagaagcactcaaaagtttcattgaggaaatagaggaagttgacgataataagatttccatcaacagtttacaacaacagttgcttgaagaaaaaacggcaaacaacattttgcgaagggattattataaactccaggaacgtggaaggcgtttatgtcacgagtttcaggagttgcaagatgattattccaaacaaatgaaacaaaaggaatatgaggtgcaaaaactcaagaatgaaattaaagttttattaaacatgaacgataacttaaaggcagagaaggcccattactctcagaaagagaaacaatattttcaaaaatatacctatatagagaaatacatgaatcatgtcaaggaagagtataatagaaaagaggacgaatgcaaaaaattgaactttattattgacaagagcatgaaaaaaatagaacatttggagaggtcgcttcagactcaatttaccgctcaaaacagcttctcaactgcaatgatccaagaggaaggcccgaaagatgcccatttgaaggatcgctatcacaaagtcaaagagtttatggaacaaaagttgcagacttccaaaattaatgacccctcttgttctgaggcagaggcacttgataatgtactttgcttaatcgaaagcagtatgaaaacactggacaaaaatagtaaatgttatccaattgcgacaaaaaagtgcataaagtatgttactgactcaccaagacttaaagaaaatgaacacgttacaaattga

SEQ ID NO: 10472 - DNA, 1395 bp, Artificial Sequence
  Description of Artificial Sequence: Synthetic polynucleotide
atgccagaagatacaagctatagcaactccttcgaggattattacaacaattctcacgcgatttccccttacaaggattctttttacaaagaaatgacaccatctaagccaaatgtaaggtttggtgatgatgatgttaacatttttgatcaaagaaaaaaagtaaatgaaatcaacaagaataacaccgtcaaaaggtctatcccatcttctataagcaccactattacccccaacaagtctagcttaaagtctccaaggggaaaaagggcttccaagaattcttttgataatgaaactaagttagaaagtaaaaatgaaactttgaaagaggtcaatgacgcggttaaccgttgctatgcgctttgtaacattccaactaagcatgtatccataaatagtatttctgatttggcgcagacgttcgaaacgcttgctgtagggataacccatgaaacgaacagaaaagctgagtgtgaaagaagcaagaatgcaatagattctctttactaccatgaacagttagaaaaaaaagaacttaatgaaaaaagccttcaaatggcaatcgatcacttgttgaaggtcacaaagcaaaatttgagacaagctgacgatggaaacaaattgaaagaaacagaagcactcaaaagtttcattgaggaaatagaggaagttgacgataataagatttccatcaacagtttacaacaacagttgcttgaagaaaaaacggcaaacaacattttgagaagggattattataaactccaggaacgtggaaggcgtttatgtcacgagtttcaggagttgcaagatgattattccaaacaaatgaaacaaaaggaatatgaggtgcaaaaactcaagaatgaaattaaagttttattaaacatgaacgataacttaaaggcagagaaggcccattactctcagaaagagaaacaatattttcaaaaatatacctatatagagaaatacatgaatcatgtcaaggaagagtataatagaaaagaggacgaatgcaaaaaattgaactttattattgacaagagcatgaaaaaaatagaacatttggagaggagtcttcagactcaatttaccgctcaaaacagcttctctactgcaatgatccaagaggaaggcccgaaagatgcccatttgaaggatcgctatcacaaagtcaaagagtttatggaacaaaagttgcagacttccaaaattaatgacccctcttgttctgaggcagaggcacttgataatgtactttgcttaatcgaaagcagtatgaaaacattagacaaaaatagtaaatgttatccaattgcgacaaaaaagtgcataaagtatgttactgactctccaagacttaaagaaaatgaacacgttacaaattga

SEQ ID NO: 10473 - DNA, 2382 bp, Saccharomyces cerevisiae
atggtaatacaaactgctactacgttatcgccagctaaggcgagaccttctttccctcataacgatttgattaaaagtatgtcagacagccttataagtcgccccactcaccctccgattaggaaattaaagtcatccttgaaaatatcacaccctgaacctatttcaagatcaaagtcagaaattttctgcacatcacctgagaaaaatgtacgttttgctattgaattaacaactgttaagagatttgataaaaacgcggagccaagttctatctcaaatgaaaactcacccacattatcccctgttgatagcaataccgctgctgatgacgtccagcttttcaacaatgaggactgctggttcaatgattcttcgttggtcacaaacttgctgaaaaatgaaaagaagtttcgttatatgaattccttaaacaacatgttcaagttggacctttatgattcagaagatgaggatgatattgacgagcacatcaatagccaggccgagtatgggtatacctataattctttatctacccgaggaaaaacttctgaaaataaatctgctacctcttcactggctactcaggcaacaaatatatgtgattggaaacttcactgcacagacttggttcccttcaagatagcccctccactatttaccaaaacattatcggcctccgatttgcaaggtcagctcacaaagtacttaaatggccaaaatgtaaaactgcattctctcactcaattaggcgatgattcaagcaaaattacaggtctagtgtacgtcaaaaacttgagttttgaaaagtatttggaaattaaatttacgttcaactcttggagagatattcattacgttaccgccaactttaatagaacgataaattcgaatgttgatgagtttaaatttacaattgatttgaatagtttgaagtacattttactcatcaaaagaatcattactatggaaaagaatacaagcagctgtccactcaacattgaattatgctgcaggtatgacgttaataatgaaacatattatgataataataatggtaaaaattatcaccttttcatgactaccttcaagaagggcggtgaaacgaaggaaaagattccagttgtcgtcgagcctgcttctcaaacagatgcagccatgtcgccgaaggaaatgaaagcaaggttcgtctcctcgaatcccactctttcaaggtttttacctcaatcaagaaagttcagcgaggatacagattactataatacatctccattgaaacatctttatcataatgatacgacaagctgggttaagcccaagagattgaacgttgttttagataaacttgaaaatgctacccctcctcctccttcttctgctttggctaacgacaccgccagaactggtaaaataactaaagataagaacaatgtgctcgccccaccaacggccagtaatagtattgacctaccaatattaggatctcaacatcaatcactatattctggttcatcgtcatattcttcatcatcttcctccatttcctcttcattatcctttgcttcttcaaacaattcctccacaaattcttcttccgcctcttgtagtttcccacttactgagctcgataattttgattatgcgaacctatatgaacctaatgataccttcacaacggccaatttgtttaatcattcattaaattccctaatgccggagatttctactccatcattcttcggaggctttagaaatgagaatactattaataacaacgatagtaaaaatttggttacctctttggaggattcatatgaggacaaacaaagtgttattacagatactactatggacgaaaataataaaacttcgactatcaacaattccacagacacgttaatcaaaccctcaaaagaaaatggaacagttaaggagaataaatcatctgcaaacagcaccagtgcaccatcttcatctcagaaccgggccagtacaatactaaacgatcattcgaatgggaagagtgatctcaaatatgtcaactatcaatcattattggattcccattgtttctacaatcatccctcgtcgccgaatcttcaatctacttcattctcgagcgcagctcctttctcgggaatttcccaagcttctgatatttttgactatgaaaacgaagatagtgatagtaatcagattgcgggagaaatagacaataattcgtttcctcctcacttttacttagatgaggatgataaatctgcatgtctcagtgatgacgctttgattgatcatcacagaaataccaacccatttataaatactttcagttcatctccacccatcctttcccaagaggttgatcgatggcgactttga

SEQ ID NO: 10474 - DNA, 2382 bp, Artificial Sequence
  Description of Artificial Sequence: Synthetic polynucleotide
atggtaatacaaactgctactacgttatctccagctaaggcgagaccttctttccctcataacgatttgattaaaagtatgtctgacagccttataagtcgccccactcaccctccgattaggaaattaaagtcttccttgaaaatatctcaccctgaacctatttctagatccaagtctgaaattttctgcacatctcctgagaaaaatgtacgttttgctattgaattaacaactgttaagagatttgataaaaacgcggagccaagttctatctctaatgaaaactctcccacattatcccctgttgatagcaataccgctgctgatgacgtccagcttttcaacaatgaggactgctggttcaatgattcttctttggtcacaaacttgttgaaaaatgaaaagaagtttcgttatatgaattccttaaacaacatgttcaagttggacctttatgattctgaagatgaggatgatattgacgagcacatcaatagccaggccgagtatgggtatacctataattctttatctaccagaggaaaaacttctgaaaataaatctgctacctcttctttggctactcaggcaacaaatatatgtgattggaaacttcactgcacagacttggttcccttcaagatagcccctccattatttaccaaaacattatctgcctccgatttgcaaggtcagctcacaaagtacttaaatggccaaaatgtaaaattgcattctctcactcaattaggcgatgattctagcaaaattacaggtttagtgtacgtcaaaaacttgagttttgaaaagtatttggaaattaaatttacgttcaactcttggagagatattcattacgttaccgccaactttaatagaacgataaatagtaatgttgatgagtttaaatttacaattgatttgaatagtttgaagtacattttactcatcaaaagaatcattactatggaaaagaatacaagcagctgtccactcaacattgaattatgctgcaggtatgacgttaataatgaaacatattatgataataataatggtaaaaattatcaccttttcatgactaccttcaagaagggcggtgaaacgaaggaaaagattccagttgtcgtcgagcctgcttctcaaacagatgcagccatgtctccgaaggaaatgaaagcaaggttcgtctcctctaatcccactctttctaggtttttacctcaatctagaaagttcagcgaggatacagattactataatacatctccattgaaacatctttatcataatgatacgacaagctgggttaagcccaagagattgaacgttgttttagataaacttgaaaatgctacccctcctcctccttcttctgctttggctaacgacaccgccagaactggtaaaataactaaagataagaacaatgtgctcgccccaccaacggccagtaatagtattgacttaccaatattaggatctcaacatcaatctttgtattctggttcttcttcttattcttcttcttcttcctccatttcctcttctttatcctttgcttcttccaacaattcctccacaaattcttcttccgcctcttgtagtttcccacttactgagctcgataattttgattatgcgaacttatatgaacctaatgataccttcacaacggccaatttgtttaatcattctttaaattccttgatgccggagatttctactccatctttcttcggaggctttagaaatgagaatactattaataacaacgatagtaaaaatttggttacctctttggaggattcttatgaggacaaacaaagtgttattacagatactactatggacgaaaataataaaacttctactatcaacaattccacagacacgttaatcaaaccctctaaagaaaatggaacagttaaggagaataaatcttctgcaaacagcaccagtgcaccatcttcttctcagaacagagccagtacaatattaaacgatcattctaatgggaagagtgatctcaaatatgtcaactatcaatctttattggattcccattgtttctacaatcatccctcttctccgaatcttcaatctacttctttcagtagcgcagctcctttcagtggaatttcccaagcttctgatatttttgactatgaaaacgaagatagtgatagtaatcagattgcgggagaaatagacaataattcttttcctcctcacttttacttagatgaggatgataaatctgcatgtctcagtgatgacgctttgattgatcatcacagaaataccaacccatttataaatactttcagttcttctccacccatcctttcccaagaggttgatagatggagactttga

SEQ ID NO: 10475 - DNA, 567 bp, Saccharomyces cerevisiae
atggatttacccaaggacaaaagtgacagaactcatcaaagaattaatctaaataacagtgggacagatcgaactaatgatttgtaccttcatattgtccaaacgttcggttgcatagaaacaactgcaacggaaaatgccacgaaactgttaatgctgggtgacgtcgaagtagaaatatctgcgagcagcgtttcaattgagtggacacagaagtcaatgataagccaaacaattgccgatagtatagtaataatgatcatcggtttgtgtgcaagcgacaagaacgtgctatctgaatcagaattgaaagagagaaaccataacgtttggaagatccaagaattgcaaaatctgtttcgagaacaatttggagacagttttagcatcgatgaaggaataggaaaaaaagaaaatgtaaagaatggtagcgtcaccataggcaagagtaaagccacgatcgatttctccaccatgaagctgattgattgtaattcgaacccactaaagggaagagtggagagcatactaagcattggccagaaattaacaactccattgtgctga

SEQ ID NO: 10476 - DNA, 567 bp, Artificial Sequence
  Description of Artificial Sequence: Synthetic polynucleotide
atggatttacccaaggacaaaagtgacagaactcatcaaagaattaatttgaataacagtgggacagatagaactaatgatttgtaccttcatattgtccaaacgttcggttgcatagaaacaactgcaacggaaaatgccacgaaattattaatgttgggtgacgtcgaagtagaaatatctgcgagcagcgtttctattgagtggacacagaagtctatgataagccaaacaattgccgatagtatagtaataatgatcatcggtttgtgtgcaagcgacaagaacgtgttatctgaaagtgaattgaaagagagaaaccataacgtttggaagatccaagaattgcaaaatttatttagagaacaatttggagacagttttagcatcgatgaaggaataggaaaaaaagaaaatgtaaagaatggtagcgtcaccataggcaagagtaaagccacgatcgatttctccaccatgaagttgattgattgtaatagcaacccattgaagggaagagtggagagcatattaagcattggccagaaattaacaactccattgtgctga

SEQ ID NO: 10477 - DNA, 816 bp, Saccharomyces cerevisiae
atgagcagtcgtgtgtgctaccatattaatggtccctttttcataatcaaattaattgatccaaaacatttgaactctttaactttcgaggattttgtatacattgcactattactgcataaggcaaacgatattgattctgttttgtttactgttctacaaagctcaggcaagtatttctcctcgggaggtaagttttcagcagttaacaagctaaacgatggagacgttacaagcgaagtggagaaagtctcaaagctggtatctgctataagctctcctaacatatttgtggcgaacgcatttgcaatccataaaaaggttctggtgtgctgtttgaatggaccggccatcggacttagcgcatcgctagttgctctttgtgacattgtttactcgcaaaacgattcagtatttcttctttttcccttcagcaatctcggttttgtcgcagaagtgggaacttctgttaccttaactcaaaaactgggtataaattctgcaaacgaacatatgattttcagcacaccagttctatttaaagaattgataggaactattattacaaaaaattatcaattgacaaatactgaaacattcaatgaaaaagttcttcaggacataaagcagaatttagaagggctttatccgaaaagtgtactaggtatgaaagaattgttacacagtgaaatgaaacagaagcttatcaaagcacaagcaatggagactaacggaaccttgcctttttgggcaagcggcgagccattcaaaagatttaaacagcttcaagagggaaacaggcgccacaagttataa

SEQ ID NO: 10478 - DNA, 816 bp, Artificial Sequence
  Description of Artificial Sequence: Synthetic polynucleotide
atgagcagtcgtgtgtgctaccatattaatggtccctttttcataatcaaattaattgatccaaaacatttgaactctttaactttcgaggattttgtatacattgcattattattacataaggcaaacgatattgattctgttttgtttactgttttgcaaagcagtggcaagtatttctccagtggaggtaagttttctgcagttaacaagttgaacgatggagacgttacaagcgaagtggagaaagtctccaagttggtatctgctataagctctcctaacatatttgtggcgaacgcatttgcaatccataaaaaggttttggtgtgctgtttgaatggaccggccatcggacttagcgcatctttggttgctctttgtgacattgtttactctcaaaacgattctgtatttcttctttttcccttcagcaatctcggttttgtcgcagaagtgggaacttctgttaccttaactcaaaaattgggtataaattctgcaaacgaacatatgattttcagcacaccagttttatttaaagaattgataggaactattattacaaaaaattatcaattgacaaatactgaaacattcaatgaaaaagttcttcaggacataaagcagaatttagaagggctttatccgaaaagtgtattgggtatgaaagaattgttacacagtgaaatgaaacagaagcttatcaaagcacaagcaatggagactaacggaaccttgcctttttgggcaagcggcgagccattcaaaagatttaaacagcttcaagagggaaacaggcgccacaagttatga

SEQ ID NO: 10479 - DNA, 1902 bp, Saccharomyces cerevisiae
atgggactcctaaactcttcagataaggaaattatcaaaagggctctaccaaaagcgtcgaataagattattgatgttacggtggctcgactatacattgcataccctgataaaaatgaatggcagtacactggactttcaggagctcttgctctagtagacgatcttgtggggaatactttttttttgaaattagttgacatcaatggccatagaggagttatctgggaccaagaattgtatgtgaattttgaatactatcaagaccgtactttttttcatacatttgagatggaagaatgctttgcaggtttattgtttgtagatattaatgaagcatcgcactttttaaagagagttcaaaagcgtgaaagatatgctaacaggaaaactttgttgaacaaaaatgctgtagcattaaccaagaaagtaagagaagaacaaaaatctcaagtggtgcacggcccaagaggggagtcattgattgacaatcaaaggaaaagatataattatgaagatgtggacacaattccaactacaaagcataaggctcctccccctcctccgccaacggccgaaacatttgattcagaccaaacaagttcattttccgatatcaattcgacaacagcatccgcaccgactaccccagcccctgctcttcctcctgcatctcctgaagtaagaaaagaagaaacgcatccaaagcatagtttaccgcctttaccaaatcagtttgcgccattaccagaccctccacaacataactctccacctcaaaataacgcgccttcgcaaccccaaagcaatccatttccattcccaattcctgaaattccctcgacacagtctgcaacaaacccatttccatttccggtacctcagcagcagtttaatcaagctccttcaatgggcataccacagcagaataggccccttccacagttgcctaacagaaataatcggcctgtgccacctcctccgccaatgcgtaccactactgaaggttcaggtgttcgcctacctgctcctccacctccgccaaggcgtgggccagcaccaccgcctccaccacataggcacgtaaccagtaataccctgaattctgccggtggaaatagcctccttccacaggccactggaagaagagggccagcaccaccacctcctccaagagcatctcgccccacaccaaacgttacgatgcaacaaaatccacaacagtacaataattctaaccgcccctttggatatcagacaaatagcaacatgtcatctccaccccctcctccagtgacaactttcaataccctgacaccacaaatgactgcagcaactggacaacctgcagttccccttcctcagaatactcaagcaccttcgcaagccacaaatgtgccagtggcaccaccacctcctccggcatctttaggccagtcgcagatacctcagtcagcaccctcagcacctattccgccaacgttaccatcgacgacgagtgctgcaccacctccgccaccagcattcctaactcaacaacctcaatctggaggagctccagctccacccccacctcctcaaatgccagctacatcaacatccggaggcggttcattcgctgaaactactggagatgcaggtcgtgatgcacttttagcttcaattagaggggcaggtggcataggcgctttgagaaaagttgacaaatcgcagctagataagccctcagttttactgcaggaagcacgtggagaatctgcttcaccaccagcagcggctggaaatggaggcacacctggtggacctccggcttctttagcagatgcgttggcagcagctttaaacaaaagaaaaactaaagtgggagctcatgacgatatggacaatggtgatgattggtaa

SEQ ID NO: 10480 - DNA, 1902 bp, Artificial Sequence
  Description of Artificial Sequence: Synthetic polynucleotide
atgggactcttgaactcttctgataaggaaattatcaaaagggctttgccaaaagcgtctaataagattattgatgttacggtggctaggttgtacattgcataccctgataaaaatgaatggcagtacactggactttctggagctcttgctttggtagacgatcttgtggggaatactttttttttgaaattagttgacatcaatggccatagaggagttatctgggaccaagaattgtatgtgaattttgaatactatcaagaccgtactttttttcatacatttgagatggaagaatgctttgcaggtttattgtttgtagatattaatgaagcatctcactttttaaagagagttcaaaagcgtgaaagatatgctaacaggaaaactttgttgaacaaaaatgctgtagcattaaccaagaaagtaagagaagaacaaaaatctcaagtggtgcacggcccaagaggggagtctttgattgacaatcaaaggaaaagatataattatgaagatgtggacacaattccaactacaaagcataaggctcctccccctcctccgccaacggccgaaacatttgattctgaccaaacaagttctttttccgatatcaattctacaacagcatccgcaccgactaccccagcccctgctcttcctcctgcatctcctgaagtaagaaaagaagaaacgcatccaaagcatagtttaccgcctttaccaaatcagtttgcgccattaccagaccctccacaacataactctccacctcaaaataacgcgccttctcaaccccaaagcaatccatttccattcccaattcctgaaattccctccacacagtctgcaacaaacccatttccatttccggtacctcagcagcagtttaatcaagctccttctatgggcataccacagcagaataggccccttccacagttgcctaacagaaataatagacctgtgccacctcctccgccaatgcgtaccactactgaaggttctggtgttcgcttacctgctcctccacctccgccaaggcgtgggccagcaccaccgcctccaccacataggcacgtaaccagtaataccttgaattctgccggtggaaatagcctccttccacaggccactggaagaagagggccagcaccaccacctcctccaagagcatctcgccccacaccaaacgttacgatgcaacaaaatccacaacagtacaataattctaaccgcccctttggatatcagacaaatagcaacatgtcttctccaccccctcctccagtgacaactttcaataccttaacaccacaaatgactgcagcaactggacaacctgcagttccccttcctcagaatactcaagcaccttctcaagccacaaatgtgccagtggcaccaccacctcctccggcatctttaggccagtctcagatacctcagtctgcaccctctgcacctattccgccaacgttaccatctacgacgagtgctgcaccacctccgccaccagcattcttgactcaacaacctcaatctggaggagctccagctccacccccacctcctcaaatgccagctacatctacatccggaggcggttctttcgctgaaactactggagatgcaggtcgtgatgcacttttagcttccattagaggggcaggtggcataggcgctttgagaaaagttgacaaatctcagttagataagccctctgttttattgcaggaagcacgtggagaatctgcttctccaccagcagcggctggaaatggaggcacacctggtggacctccggcttctttagcagatgcgttggcagcagctttaaacaaaagaaaaactaaagtgggagctcatgacgatatggacaatggtgatgattggtga

SEQ ID NO: 10481 - DNA, 192 bp, Saccharomyces cerevisiae
atggctaaagttcacggttctctagctcgtgctggtaaagttaagtctcaaactccaaaggttgaaaaaactgaaaagccaaagaaaccaaagggtcgtgcttacaagagattattgtacaccagaagattcgttaacgttaccttggttaacggtaagagaagaatgaacccaggtccatctgtccaatag

SEQ ID NO: 10482 - DNA, 192 bp, Artificial Sequence
  Description of Artificial Sequence: Synthetic polynucleotide
atggctaaagttcacggttctttggctcgtgctggtaaagttaagtctcaaactccaaaggttgaaaaaactgaaaagccaaagaaaccaaagggtcgtgcttacaagagattattgtacaccagaagattcgttaacgttaccttggttaacggtaagagaagaatgaacccaggtccatctgtccaatga

SEQ ID NO: 10483 - DNA, 390 bp, Saccharomyces cerevisiae
atgagattacttcaccatggtgaatacgggacaaaactaattggaggaaaatgcagcatagatgggaaactcggtcacccttgcccgctaagcagaagacgcaaaaaacatctgcgcgaaaaagaaatgggtccacaatatgtacggatgtatggtcccaaaagaaaagccataataaggacaggaaacccggatgacggcattaatttacctgacaccggccgaggcaccttaactgcagccacaatttggtcacgagcttaccattcaaattattcttaccttgtacgcccaaaagtagtgactctttctaagcatcgcgaattaatgactacttttcttttatacgttttatatgtatgtatatatataagtgccttcataaaatag

SEQ ID NO: 10484 - DNA, 390 bp, Artificial Sequence
  Description of Artificial Sequence: Synthetic polynucleotide
atgagattacttcaccatggtgaatacgggacaaaattgattggaggaaaatgcagcatagatgggaaactcggtcacccttgcccgttaagcagaagacgcaaaaaacatttacgcgaaaaagaaatgggtccacaatatgtaagaatgtatggtcccaaaagaaaagccataataaggacaggaaacccggatgacggcattaatttacctgacaccggccgtggcaccttaactgcagccacaatttggagcagagcttaccattctaattattcttaccttgtacgcccaaaagtagtgactctttctaagcatcgcgaattaatgactacttttcttttatacgttttatatgtatgtatatatataagtgccttcataaaatga

SEQ ID NO: 10485 - DNA, 1188 bp, Saccharomyces cerevisiae
atgtctttggaaagagaggaaccacaacatttcggagcagggccagctcaaatgcctacaccagttttgcaacaagctgctaaagacttaatcaatttcaatgacataggtttgggtatcggtgaaatttctcaccgttcgaaggatgccaccaaagtgattgaagactctaagaagcacttaatcgaactgctaaatattcctgacactcatgaagtgttctacttgcaaggtggtggcactactggtttttcttccgttgctactaatttggcagctgcatatgtgggtaagcatgggaagattgcacctgccggttatttagtcaccggtagttggtctcagaaatcttttgaagaggcaaagagattgcacgttcctgctgaagttatcttcaacgctaaagattataacaatggcaaatttggtaaaattccggatgaatccctttgggaagataaaatcaaaggtaaggctttctcatacgtgtacctatgtgagaatgaaactgttcatggtgttgaatggccagaattaccaaaatgtttagtaaacgaccccaacatcgaaattgttgctgacttatccagcgacattttgtctcgtaagattgacgtttctcaatacggtgtcatcatggcaggcgcccaaaaaaacattggtttagcaggcttaaccctatacattatcaagaaatccatccttaagaatatttctggcgcttctgatgaaacattacatgaattgggagtaccaatcacccctattgcattcgactatccaacggtggtgaagaacaactcagcctataatacaattccaattttcactttacatgttatggatctcgtgttccaacatattttgaagaagggtggtgttgaagcgcaacaggctgaaaatgaagaaaaggccaagatattatatgaggcattggatgcaaattcagatttttacaacgttccagtggatccaaagtgtagatcaaaaatgaatgtcgttttcacccttaaaaaggacggccttgatgaccagtttctaaaagaggcagctgctcgtcatttaaccggtttgaaaggacatcgttcagttggtgggttcagagcctccatctataacgcgctttcagtgaaagctgtacaaaacttggtagattttatcaaggaatttgctgagaaaaacgcttaa

SEQ ID NO: 10486 - DNA, 1188 bp, Artificial Sequence
  Description of Artificial Sequence: Synthetic polynucleotide
atgtctttggaaagagaggaaccacaacatttcggagcagggccagctcaaatgcctacaccagttttgcaacaagctgctaaagacttaatcaatttcaatgacataggtttgggtatcggtgaaatttctcaccgttccaaggatgccaccaaagtgattgaagactctaagaagcacttaatcgaattattgaatattcctgacactcatgaagtgttctacttgcaaggtggtggcactactggtttttcttccgttgctactaatttggcagctgcatatgtgggtaagcatgggaagattgcacctgccggttatttagtcaccggtagttggtctcagaaatcttttgaagaggcaaagagattgcacgttcctgctgaagttatcttcaacgctaaagattataacaatggcaaatttggtaaaattccggatgaatccctttgggaagataaaatcaaaggtaaggctttctcttacgtgtacttgtgtgagaatgaaactgttcatggtgttgaatggccagaattaccaaaatgtttagtaaacgaccccaacatcgaaattgttgctgacttatccagcgacattttgtctcgtaagattgacgtttctcaatacggtgtcatcatggcaggcgcccaaaaaaacattggtttagcaggcttaaccttatacattatcaagaaatccatccttaagaatatttctggcgcttctgatgaaacattacatgaattgggagtaccaatcacccctattgcattcgactatccaacggtggtgaagaacaactctgcctataatacaattccaattttcactttacatgttatggatctcgtgttccaacatattttgaagaagggtggtgttgaagcgcaacaggctgaaaatgaagaaaaggccaagatattatatgaggcattggatgcaaattctgatttttacaacgttccagtggatccaaagtgtagaagtaaaatgaatgtcgttttcacccttaaaaaggacggccttgatgaccagtttttgaaagaggcagctgctcgtcatttaaccggtttgaaaggacatcgttctgttggtgggttcagagcctccatctataacgcgctttctgtgaaagctgtacaaaacttggtagattttatcaaggaatttgctgagaaaaacgcttga

SEQ ID NO: 10487 - DNA, 663 bp, Saccharomyces cerevisiae
atgtcagcacctgctcaaaacaatgccgaggttcccactttcaagttagttcttgttggtgatggaggtactggtaagactacctttgtgaagagacatctgaccggtgaatttgaaaaaaaatacattgcaactatcggagtagaagttcatcctctatctttttatactaatttcggtgaaattaagttcgatgtctgggataccgcaggccaagaaaaatttggcgggttaagggatggttattacatcaatgctcaatgtgcaattattatgttcgatgtcacatccagaatcacttacaagaacgtccctaattggcatagagacttagtccgtgtgtgtgaaaatattcccatagtgctatgtggcaataaagtcgatgtcaaagagagaaaggtcaaggccaagactatcactttccatagaaaaaagaacttacaatattatgacatttctgcaaaatccaattataattttgaaaagcctttcttgtggttggctagaaaacttgccggtaacccacaattggagtttgttgcgtctcctgcattggccccacctgaggtgcaagttgacgagcaactaatgcaccaataccagcaagaaatggaccaagccactgctttaccattacctgatgaagacgatgctgatttataa

SEQ ID NO: 10488 - DNA, 663 bp, Artificial Sequence
  Description of Artificial Sequence: Synthetic polynucleotide
atgtctgcacctgctcaaaacaatgccgaggttcccactttcaagttagttcttgttggtgatggaggtactggtaagactacctttgtgaagagacatttgaccggtgaatttgaaaaaaaatacattgcaactatcggagtagaagttcatcctttatctttttatactaatttcggtgaaattaagttcgatgtctgggataccgcaggccaagaaaaatttggcgggttaagggatggttattacatcaatgctcaatgtgcaattattatgttcgatgtcacatccagaatcacttacaagaacgtccctaattggcatagagacttagtccgtgtgtgtgaaaatattcccatagtgttgtgtggcaataaagtcgatgtcaaagagagaaaggtcaaggccaagactatcactttccatagaaaaaagaacttacaatattatgacatttctgcaaaatccaattataattttgaaaagcctttcttgtggttggctagaaaacttgccggtaacccacaattggagtttgttgcgtctcctgcattggccccacctgaggtgcaagttgacgagcaattgatgcaccaataccagcaagaaatggaccaagccactgctttaccattacctgatgaagacgatgctgatttatga

SEQ ID NO: 10489 - DNA, 435 bp, Saccharomyces cerevisiae
atgactttggcttttacgaccttcgctatttccaagataaacaattcgtccacgaatgaagattctaaagtcatgatactgtgcgatgagcatcaccctttcgagaagggttactttaagtccgccatacgagccttcggcaacagcattaagctaggattaatgggtaactcgcgaccagaagacgcagcgtccatattccaagataaaaatattcctcacgatctgacgacggaagaattcaggttgcagctggtctgtatggctttttcctggttcatatttggtctcttcatcgcctgcttactactttgtatcacgcttgtgctaacatcgcgatatcctggagaaaatgaaaacaaagccacggaagttgtgccatccagtaatattgacgacgaagaaaagcaattatcgctttccgacatgatttag

SEQ ID NO: 10490 - DNA, 435 bp, Artificial Sequence
  Description of Artificial Sequence: Synthetic polynucleotide
atgactttggcttttacgaccttcgctatttccaagataaacaattcttccacgaatgaagattctaaagtcatgatattgtgcgatgagcatcaccctttcgagaagggttactttaagtccgccataagagccttcggcaacagcattaagttgggattaatgggtaactctagaccagaagacgcagcgtccatattccaagataaaaatattcctcacgatttgacgacggaagaattcaggttgcagttggtctgtatggctttttcctggttcatatttggtctcttcatcgcctgcttattactttgtatcacgcttgtgttaacatctagatatcctggagaaaatgaaaacaaagccacggaagttgtgccatccagtaatattgacgacgaagaaaagcaattatctctttccgacatgatttga

SEQ ID NO: 10491 - DNA, 1314 bp, Saccharomyces cerevisiae
atgtcagctttattaccaagattactcacaagaacagcttttaaagcttctgggaaacttctgaggctctcttcagtaatttctaggaccttttctcaaactactacttcctatgcagctgcttttgatcgttccaaaccgcatgtaaatataggtacgatcggccatgttgatcatgggaagacaactttaaccgcagccattacgaaaacgttagccgcaaaaggtggtgccaacttcttggactatgctgccatcgataaggctccggaagaaagagctcgtggtattacaatttctactgcacacgtggaatacgaaacggccaagagacattattctcacgtcgactgtccaggccacgctgattacatcaagaatatgattaccggtgctgctcaaatggatggtgctatcattgttgtagctgctaccgatggacaaatgccccaaactagagaacatttacttttggccagacaagttggtgtccaacatattgtcgtttttgttaacaaggttgataccattgatgatccagaaatgttagagttagtcgaaatggaaatgagagaacttttaaacgaatatgggtttgacggtgataatgctccaattatcatgggttctgccctttgcgctttggaaggtcgccaacctgaaattggggagcaggccatcatgaaacttttggatgcagtggatgagtatattcctacacctgaaagagatttgaacaagcctttcttgatgcccgttgaagatatcttctctatctccggtagaggtactgtggtcactggtcgtgtggaaaggggtaatttaaagaaaggtgaggaattggaaattgttggtcacaactccaccccattgaaaacaacagttactggtattgaaatgtttagaaaggaattggactctgctatggcaggtgacaatgccggtgttttacttagaggtatcaggagagatcaattgaagagaggtatggtcttagctaagccaggtaccgttaaagcccatacaaagattctagcctctttgtacattttatccaaagaggaaggtggtagacattctgggtttggtgaaaactacagaccacaaatgtttataagaacagctgatgttacagttgtgatgagatttcctaaggaggttgaagatcattctatgcaagttatgccaggtgacaatgttgaaatggaatgtgatttgatccatcctaccccattagaagttggtcaacgtttcaatatcagagagggtggaagaactgttggtaccggtctaatcacacgtattattgaatag

SEQ ID NO: 10492 - DNA, 1314 bp, Artificial Sequence
  Description of Artificial Sequence: Synthetic polynucleotide
atgtctgctttattaccaagattactcacaagaacagcttttaaagcttctgggaaacttttgaggctctcttctgtaatttctaggaccttttctcaaactactacttcctatgcagctgcttttgatcgttccaaaccgcatgtaaatataggtacgatcggccatgttgatcatgggaagacaactttaaccgcagccattacgaaaacgttagccgcaaaaggtggtgccaacttcttggactatgctgccatcgataaggctccggaagaaagagctcgtggtattacaatttctactgcacacgtggaatacgaaacggccaagagacattattctcacgtcgactgtccaggccacgctgattacatcaagaatatgattaccggtgctgctcaaatggatggtgctatcattgttgtagctgctaccgatggacaaatgccccaaactagagaacatttacttttggccagacaagttggtgtccaacatattgtcgtttttgttaacaaggttgataccattgatgatccagaaatgttagagttagtcgaaatggaaatgagagaacttttaaacgaatatgggtttgacggtgataatgctccaattatcatgggttctgccctttgcgctttggaaggtcgccaacctgaaattggggagcaggccatcatgaaacttttggatgcagtggatgagtatattcctacacctgaaagagatttgaacaagcctttcttgatgcccgttgaagatatcttctctatctccggtagaggtactgtggtcactggtcgtgtggaaaggggtaatttaaagaaaggtgaggaattggaaattgttggtcacaactccaccccattgaaaacaacagttactggtattgaaatgtttagaaaggaattggactctgctatggcaggtgacaatgccggtgttttacttagaggtatcaggagagatcaattgaagagaggtatggtcttagctaagccaggtaccgttaaagcccatacaaagattttagcctctttgtacattttatccaaagaggaaggtggtagacattctgggtttggtgaaaactacagaccacaaatgtttataagaacagctgatgttacagttgtgatgagatttcctaaggaggttgaagatcattctatgcaagttatgccaggtgacaatgttgaaatggaatgtgatttgatccatcctaccccattagaagttggtcaacgtttcaatatcagagagggtggaagaactgttggtaccggtttgatcacacgtattattgaatga

SEQ ID NO: 10493 - DNA, 3414 bp, Saccharomyces cerevisiae
atgaacgatatggcaaaacctctcccaactccaccgactgctgagatcaggaaaagtcgatccaattcaccaaaaaaagctcagaaaacaaatctaagtccaaacaaaaatcagaataatgagaaaaatgtacctagatcaaacggaagaaccaaaaacgaacacaatagtatggatgacgaagagtttgaattcttccatcaatttagtcgggagaaagttaaaggcgtcatacacgtaatcaccgctgaacttaaggaaaaaggtccagatgttgaatttttaatgataccgttcaggccggaacagacgaacgacaaattgctgacattactaaatcagctattcccactaggaaacggtcaaccagtcaacgaaaaaaaacagctcagaattgtttccaaggccgatgtctggactttatttcaatgcttaaaatacatttggtgcagacttccaaattcagaaatcataggctggaaatcttatttggagtttaaattcagggaagaagataaaaaatttcctcgaaaatcatttttggaaattatgcctcaatgtctagcttccccaaatcatgcatcaatcgtttacgatttttttgacttgattatttcaatttcatcaaattcaagagttaataaaatgagtgctagaaaaatatcgaagatgtgtgcaatctgggcgtttagtaaacagataccaaattctgatatccaagattacgattttgaatcagccgccatgaagtcttttgcccccaacaattccatacaagatgggctagatcagtggattccggcttcagatgccatgtttcacctactcttagcatttctaagaagttttgtccctcaagatcttgaatcggcaaagctgccgcgcacacttaagagtttactattcaataatcagtatcctccaagaaaatcaacagcgtacacatcagagacaatcctaaccattcctctggtaactttaaaaacagacgtcttttcgagaaaaccttggcaattattggagcgttgcaatgatcttcttgatttcagtgatcatgatgcattcgaagcaagagaggactacgctttattaaagtctttattcagaaagaaaaatacagtggagggaattagcaggaaaatgtcccaggagtcaagaaggttgatgaaagcaatgtctaccaaacattcaacatttcaaccaggttgggctcccagagaatgtattgaaaatatttctcatttaaaagaatgtattgaggttaaaagactagatatcgatgattattttatttggacttggttatcgtccctttctttcgaacaaacatccgaaaagaaaaaaatttttggaagatctattatattggaatttgaatttgatggatttaaaaaatgggtggttttccaagaatgtgatataacgttagattataataaaaagggtcaattgaagaaaaagacttctgcacagtcaccaacgaccgaaaaggaactacctcctgatgactttgaattagaagatccacctctctccaaatctcctacactatctcagacctacaaaaaattccaagctgaggtacctcagcaaagtactgttcgaagggattcagcacccgataaccaaggaatctatcacacagtcattagtaaaaatgcattgactaaaaataagcataatgtgaatttgcattcttttgaacataaaatctccaaatggaatcctctaaacaacctgcgaaagaaaagcggtagtaactctagtagttcatcatttgaggaaaaaagtaaagacgctcccatccgcgaagaataccataccaacaaaaatcacaaatcgaaaaaagaagagcgagtactatctcagtttagcacacttaatcctgatgaatatcagttaccagtaatagagaccggttcatcaaactttaagattgaaataccggaattaatgtacgaacacgatgatgacgacagtgacaaacttaaaaattcccagaaaagagctaccgactcagctattgaagaattaaacggtatggttgaagaaatgatgattaatgagccagacgatgtaaaaatctccataactgaggcagagactttcgaatcattgacaaagtttgatcaatataagccatccaatataactgacgatgacttacaaagcagccattcaagcgccgttcactcattgaagctaagtacaaatacaaatgattcttgcgctgatagttccaaatacaccgctgataggaaattagcggaacctagaaagatttctgaggaatccaaagtcaacgacgattcatcatcatattattctccaaatatcaacaacttgccggcatcaagaatgcctagtcaacccacttattcaaattcggattcgaaaaaggcatttacgaatgagtctcgcctgaacgtcttacaaggtgcagtcagtccatctcaacaggtaacaccaaaaccatataaaaatgcgcctggagactgtgtatctcctgttcagcaaaaatactatcagaacgatcgtagaaatgaaatgtcgcctgcaagtgcaccagttccaccttctgcatattcacctgcgaggtctccacaattctccaccaattcggctggattcaagcagaacacgattaatgtacccgttgggtataatgatcctgctcacgttttagcaaatcaaccacatatgacatatcgggaccagcataattatccatctcaccaacaaaaacaacgtcccttccaaaacaatattgtgcccccagaactaaagtccagaaatcaacgggcagatgcttcacctattccccaacatatggtgccagtaaaacaaggtgtgcccaatcttccatctaacgttccattatatcaacaaatggaacgaatgaaccctaaccaccagcaccctgtaaatacttacaaggtaactcagccgccgtatcataataacacaacaaatgcttatgggaacagccgggcaggcaatgctcatatgttagatggaaagtggagcaataatccgccgcaaatggtaccaaagggagttcgccccaatcaatatccacagcagcacgttaataggtattcaccgcaagctcaacctgtcgtacctgcggaatactacaatggacctccacctatgcgagcacctccaatgatgtcccatatggtaccagctcaggagccgatacgttacacagctggtgctaacaggcgtagttttccccaaggcatgcagcagaatgcctattccgtacccgctcagcctatgggggctgtaaatagtgaattttacctaccagaagctcctcagggaaacaaactgcatggaaatattaacaaaagacaggagagaaagaagctatatgataacattagaagcggaaatttcggcatatag

SEQ ID NO: 10494 - DNA, 3414 bp, Artificial Sequence
  Description of Artificial Sequence: Synthetic polynucleotide
atgaacgatatggcaaaacctctcccaactccaccgactgctgagatcaggaaaagtagatccaattctccaaaaaaagctcagaaaacaaatttgagtccaaacaaaaatcagaataatgagaaaaatgtacctagatctaacggaagaaccaaaaacgaacacaatagtatggatgacgaagagtttgaattcttccatcaatttagtagagagaaagttaaaggcgtcatacacgtaatcaccgctgaacttaaggaaaaaggtccagatgttgaatttttaatgataccgttcaggccggaacagacgaacgacaaattgttgacattattgaatcagttattcccattaggaaacggtcaaccagtcaacgaaaaaaaacagctcagaattgtttccaaggccgatgtctggactttatttcaatgcttaaaatacatttggtgcagacttccaaattctgaaatcataggctggaaatcttatttggagtttaaattcagggaagaagataaaaaatttcctagaaaaagttttttggaaattatgcctcaatgtttggcttccccaaatcatgcatctatcgtttacgatttttttgacttgattatttccatttcttccaattctagagttaataaaatgagtgctagaaaaatatccaagatgtgtgcaatctgggcgtttagtaaacagataccaaattctgatatccaagattacgattttgaaagtgccgccatgaagtcttttgcccccaacaattccatacaagatgggttagatcagtggattccggcttctgatgccatgtttcacctcctcttagcatttttaagaagttttgtccctcaagatcttgaaagtgcaaagttaccgcgcacacttaagagtttattattcaataatcagtatcctccaagaaaatctacagcgtacacaagtgagacaatcttgaccattcctttggtaactttaaaaacagacgtcttttccagaaaaccttggcaattattggagcgttgcaatgatcttcttgatttcagtgatcatgatgcattcgaagcaagagaggactacgctttattaaagtctttattcagaaagaaaaatacagtggagggaattagcaggaaaatgtcccaggagagcagaaggttgatgaaagcaatgtctaccaaacattctacatttcaaccaggttgggctcccagagaatgtattgaaaatatttctcatttaaaagaatgtattgaggttaaaagattagatatcgatgattattttatttggacttggttatcttccctttctttcgaacaaacatccgaaaagaaaaaaatttttggaagatctattatattggaatttgaatttgatggatttaaaaaatgggtggttttccaagaatgtgatataacgttagattataataaaaagggtcaattgaagaaaaagacttctgcacagtctccaacgaccgaaaaggaattacctcctgatgactttgaattagaagatccacctctctccaaatctcctacattatctcagacctacaaaaaattccaagctgaggtacctcagcaaagtactgttagaagggattctgcacccgataaccaaggaatctatcacacagtcattagtaaaaatgcattgactaaaaataagcataatgtgaatttgcattcttttgaacataaaatctccaaatggaatcctttgaacaacttaagaaagaaaagcggtagtaactctagtagttcttcttttgaggaaaaaagtaaagacgctcccatccgcgaagaataccataccaacaaaaatcacaaatctaaaaaagaagagagggtattatctcagtttagcacacttaatcctgatgaatatcagttaccagtaatagagaccggttcttccaactttaagattgaaataccggaattaatgtacgaacacgatgatgacgacagtgacaaacttaaaaattcccagaaaagagctaccgactctgctattgaagaattaaacggtatggttgaagaaatgatgattaatgagccagacgatgtaaaaatctccataactgaggcagagactttcgaatctttgacaaagtttgatcaatataagccatccaatataactgacgatgacttacaaagcagccattctagcgccgttcactctttgaagttgagtacaaatacaaatgattcttgcgctgatagttccaaatacaccgctgataggaaattagcggaacctagaaagatttctgaggaatccaaagtcaacgacgattcttcttcttattattctccaaatatcaacaacttgccggcatctagaatgcctagtcaacccacttattctaattctgattctaaaaaggcatttacgaatgagtctcgcttgaacgtcttacaaggtgcagtcagtccatctcaacaggtaacaccaaaaccatataaaaatgcgcctggagactgtgtatctcctgttcagcaaaaatactatcagaacgatcgtagaaatgaaatgtctcctgcaagtgcaccagttccaccttctgcatattctcctgcgaggtctccacaattctccaccaattctgctggattcaagcagaacacgattaatgtacccgttgggtataatgatcctgctcacgttttagcaaatcaaccacatatgacatatagagaccagcataattatccatctcaccaacaaaaacaacgtcccttccaaaacaatattgtgcccccagaattgaagtccagaaatcaaagagcagatgcttcccctattccccaacatatggtgccagtaaaacaaggtgtgcccaatcttccatctaacgttccattatatcaacaaatggaaagaatgaaccctaaccaccagcaccctgtaaatacttacaaggtaactcagccgccgtatcataataacacaacaaatgcttatgggaacagcagagcaggcaatgctcatatgttagatggaaagtggagcaataatccgccgcaaatggtaccaaagggagttcgccccaatcaatatccacagcagcacgttaataggtattctccgcaagctcaacctgtcgtacctgcggaatactacaatggacctccacctatgagagcacctccaatgatgtcccatatggtaccagctcaggagccgatacgttacacagctggtgctaacaggcgtagttttccccaaggcatgcagcagaatgcctattccgtacccgctcagcctatgggggctgtaaatagtgaattttacttgccagaagctcctcagggaaacaaattgcatggaaatattaacaaaagacaggagagaaagaagctttatgataacattagaagcggaaatttcggcatatga

SEQ ID NO: 10495 - DNA, 351 bp, Saccharomyces cerevisiae
atgtcccaagaaagtagtgttttatcagaatcgcaagaacaactagccaataaccctaaaatagaggatacaagccctccctctgccaattcgagagataatagcaaacctgtacttccgtgggattacaagaataaagccatagagatcaagagcttcagtggttataaggtaaatttcaccggctggataagaagagacgtaagagaagaacgtcaaaggggaagcgagtttactgcatctgacgttaaaggatcagatgacaaagctacaaggaaaaaagaaccagcagatgaggatcctgaagtaaaacaacttgaaaaagaaggagaggatggactggactcataa

SEQ ID NO: 10496 - DNA, 351 bp, Artificial Sequence
  Description of Artificial Sequence: Synthetic polynucleotide
atgtcccaagaaagtagtgttttatctgaatctcaagaacaattggccaataaccctaaaatagaggatacaagccctccctctgccaattctagagataatagcaaacctgtacttccgtgggattacaagaataaagccatagagatcaagagcttcagtggttataaggtaaatttcaccggctggataagaagagacgtaagagaagaacgtcaaaggggaagcgagtttactgcatctgacgttaaaggaagtgatgacaaagctacaaggaaaaaagaaccagcagatgaggatcctgaagtaaaacaacttgaaaaagaaggagaggatggattggacagttga

SEQ ID NO: 10497 - DNA, 1338 bp, Saccharomyces cerevisiae
atggtttcgttcagagggctgactacactaacactactttttaccaaattagtaaactgtaatcctgtttccacaaaaaatagggactctatacagtttatttataaagaaaaggatagtatatactctgccatcaacaatcaagccatcaatgaaaaaattcatggagtcaatttgggtgggtggctagtattggagccgtatattacaccttctttattcgagactttccgtactaatccgtacaacgatgacggtattcctgttgatgaataccatttttgtgaaaaattaggctatgaaaaggcaaaggaacgcctttatagtcattggtcgacgttctataaagaggaagacttcgcgaaaattgcttctcaaggcttcaatttggttagaattcctattgggtattgggcctttacaacgttgagtcatgatccctatgttaccgccgagcaggaatattttctagaccgggctatcgattgggctaggaaatatggtttgaaagtatggattgatcttcatggagccgctggttcacaaaacggatttgataactcagggttgagggattcatataagtttctggaagatgaaaatttaagcgccaccatgaaagctttaacgtatattttaagcaaatactcaacagacgtatacctggacaccgttattggaatcgaattgctcaatgaaccgttaggtccagttattgacatggaaagattgaaaaatttgcttttgaagccggcttatgactatttgagaaataaaattaatagcaaccagatcattgtaatacatgatgcttttcaaccttaccattattgggatgggtttttgaatgatgaaaagaacgaatatggcgtcataattgaccatcatcattatcaggtgttctcgcaggtggaattaacaagaaaaatgaatgaacgtatcaaaatcgcctgccaatgggggaaagatgccgtaagcgagaagcattggtccgtagcaggcgaattttcagcggccttaacagattgtacaaagtggttaaatggggttggtctaggtgccagatatgatggaagttggaccaaagacaatgaaaaatctcattacataaatacgtgtgcaaacaacgagaatattgccttgtggcccgaagagagaaaacagaacactagaaagtttatcgaggctcaattagatgcttttgaaatgactggtggatggataatgtggtgttacaagacagagaatagtatcgaatgggatgttgaaaaattgattcaactcaacatttttccgcaacctatcaacgataggaaatatcctaaccaatgtcattga

SEQ ID NO: 10498 - DNA, 1338 bp, Artificial Sequence
  Description of Artificial Sequence: Synthetic polynucleotide
atggtttctttcagagggttgactacattaacattgctttttaccaaattagtaaactgtaatcctgtttccacaaaaaatagggactctatacagtttatttataaagaaaaggatagtatatactctgccatcaacaatcaagccatcaatgaaaaaattcatggagtcaatttgggtgggtggttggtattggagccgtatattacaccttctttattcgagactttccgtactaatccgtacaacgatgacggtattcctgttgatgaataccatttttgtgaaaaattaggctatgaaaaggcaaaggaacgcctttatagtcattggtctacgttctataaagaggaagacttcgcgaaaattgcttctcaaggcttcaatttggttagaattcctattgggtattgggcctttacaacgttgagtcatgatccctatgttaccgccgagcaggaatattttttggacagagctatcgattgggctaggaaatatggtttgaaagtatggattgatcttcatggagccgctggttctcaaaacggatttgataactctgggttgagggattcttataagtttttggaagatgaaaatttaagcgccaccatgaaagctttaacgtatattttaagcaaatactccacagacgtatacttggacaccgttattggaatcgaattgctcaatgaaccgttaggtccagttattgacatggaaagattgaaaaatttgcttttgaagccggcttatgactatttgagaaataaaattaatagcaaccagatcattgtaatacatgatgcttttcaaccttaccattattgggatgggtttttgaatgatgaaaagaacgaatatggcgtcataattgaccatcatcattatcaggtgttctctcaggtggaattaacaagaaaaatgaatgaacgtatcaaaatcgcctgccaatgggggaaagatgccgtaagcgagaagcattggtccgtagcaggcgaattttctgcggccttaacagattgtacaaagtggttaaatggggttggtttaggtgccagatatgatggaagttggaccaaagacaatgaaaaatctcattacataaatacgtgtgcaaacaacgagaatattgccttgtggcccgaagagagaaaacagaacactagaaagtttatcgaggctcaattagatgcttttgaaatgactggtggatggataatgtggtgttacaagacagagaatagtatcgaatgggatgttgaaaaattgattcaactcaacatttttccgcaacctatcaacgataggaaatatcctaaccaatgtcattga

SEQ ID NO: 10499 - DNA, 4860 bp, Saccharomyces cerevisiae
atggcagcagtacccaccatcgaccttacactagccgattcagataatgaagacatattccattctttttcgtcttcaacaagtgtggataagatagacattaggaaagaaaatgggaaattaagaatggcaggcttggaagtcgcccaatctaatgacgatgcagcacgtcaagcattccatgttttcaagacgaacatatcaaataatgaaaccttcgatactattctttcaaagagcaagacaatcacagacagtaccttcaacaatgaaaaatcttccaacgaagtaaaacagcagcaagtcttgaaggaagaaacgatgggatcttccaacgatgagaagaaaacacaagagagcagcccaagcgcagagatgataaaacttttttatgaaaacgatgatgtgccgttatccgatagttttaaacaaaaagaggaaggtaaaagaataaatcaggatgagcaagtgaaggaaaatatctgtggcatttcttcctcatacgtctccaaagactacgatggcgttgaagatgatttcgagcctaatacttgccaggacagcaatttggattttcaagaggagaagttaaacttgaataacaaaccgtcacagcaacagttcagcgacccagaaacaaaagataacagtttgaagagcgaaaacaaagaccaaataaaaggagtcacaacaacaagttatcgtgatttacctattgaatctagtgctttccaggattctgaaactcaaaataactccaaaaacactatacctaacatcgtaaatgaaaagcgaacgccagcattaccgtccaatctaagctctgttgagagttcccttaaaaacgagacggccaaagtagaggggaagacgaccgttcgtcttccaggacttcaaaataatgttgccttacttgagcaagaacaaagtgaactattcaagcactttagtgaacaacctgtcgatattagcgattttggtcgtaagattaaaaggaagcatagcggagattttgcagataacaagatacttaaaagaccgatattgccctcaaaaaatatggaccacacaacacataattcacatgattccgaacagaaaaatagctcgattattattctttcagatgaggacgaatctggtgccggtatcaatgatatagaaagtcctttgaaagtttctgaaccaaatacagctgatgcgcttaggagcagtgtaccagaagtcatatctttacttgacctacccaatattgacttgaataactcagtaataaaagaagcaagtggcagcaattcaattcctacatcagaaacagacgcacaatcctcgagttcgtcagttcttcaaggaactatcatgacagaacaagctactcaatcctctcaacacgaatgtaacagttcacttgatactctaaaaaaaaatcatcaaaaattattgaaggatttgaattctagagagtctgaactacgtaatgctctcagttgctgcaagacaaactctgaaattttaagaaggaaactaagtagaagagaaaaggaggtctctgatgctgaaaaacattggcagttattgttgacatcgatggctagagggggaagaactatcagctcaactcagcagatattagttgatgaagctgagaaccaattaaacaaactgaaggaaaaaagacagttgacaaaatcgaagctagattcaatcaatttgaaaatgtataattataacgaacaatggaagtcctttgtgcattcgaaaaatataaacctgcagaaatctttggctgcccttgagcggtcagccagggatagtaaagcttctgcgaccgtaaataaaagaaacgaatgcctggctgagaaagaaaagctagaccaaatgttaaaagaaggaaccctaagcttcagtacctacaagcagttaacaggggagatccagcagaaactgaatgacttgaaactgggggaccaacgcacaactgatatcaatagtgtattgccaatagtacggcaacctctcgccaaaagagatttatttattaagtccattgatactgcaaaagatttattagccaagaacacatccaggacagaaatgacgaagagaattctttatagacatttggacaacttggtctcttataaaaacttttttgaagacggaagatccttaatagatataaacagaagacacgttgcacatgaatcggcccaaatattgttcaccaacggtgtaaagatgcccattgtttttgaaacattacaagattacggcatcaagttttctaatccagccattgtcaatcctgacagaagagcccaatattttaaaagcatcgaagttgcacgcgatctcatatcaaagtctactagatcagaggatgctaaacgaaagattactcgatttttgaatataattgaagaatttcgtaaagatattgacaccggatttccacctactcctttaaaaagggaaggcgtcggaaaagctgttgttgggctaagacaacaaggacttaagatggacagactatatgaaaatttgagaagatataagattccaataacaagtgaagaattactgcagcaaagctatttatttccggtaaacgcagatcaacgacctccttcaaactggaacatcgtggaaaataccgaagatactagttctacagccaatgatctatcgatgcaagatgaatttcacatctctaatatgcatgcagcagaagatcaagaacagattagggctcttttagagaatgtcaaacaatctgaatccattatagacggcgaagcacttactcccgaggatatgaccgtaaacttattaaaacaccagaggctgggtctgcattggttgttacaagttgaaaactccgcaaaaaaagggggtctgcttgctgacgatatgggcctgggtaaaacgattcaagctattgcattgatgttagcaaatcgctcagaggaatccaaatgtaaaaccaatttgatcgtcgcaccagtctcagtcttgagagtttggaaaggtgaattagaaacgaaagtaaaaaaacgcgcaaaatttactacatttatttttggaggatcaggtaacggaaaagttaagcactggagggatttggcaagatatgatgctgttttggtatcttatcaaactctagcaaacgaatttaagaaacattggccgaaaaaactggatggtgaacaaaatcagctaccagctgtgcctcatatacaagctcttaataggttgaaaacctcaaatgaatactactctccatttttctgcaatgattcaacgttttacagaattttactggacgaaggccaaaacatcaagaacaaaaatacaagggcttctaaagcgtgctgtactataaatggaatgtataggtgggtcttgtctggtacgccgattcaaaatagtatggatgagctttattccttgataagatttctaagaattccaccctaccacaaggagcaacggtttaaattagacattggaaggttttttcagagaaataagcaatatcaatatgataacgaggatagaaaaaacgcattaagaaaggttagagtccttctaaatgccattatgcttcgtcggtctaaggctgataagatcgacggcaaacctttactggagctccctcctaaaattgtggaagtagatgaatcacgcctgaagggagaggaattaaaattttacacagctttggaatcaaaaaatcaagcactcgctaagaaattgttgaacaattctacgagggggagctactctagcgttctcacattactacttcgcttaaggcaggcttgttgtcattcagaattagttgtgatgggagaaaaaaaagcggaaggtacaaaggtagctaacggcaaaagctttgaagatgactggctcaggctctactataaaatcactcacatgagcggagaagcgcaggctcaggttattacttcaatgaattctatgacatgtttctggtgcatggaacaattagaaccagaagcgatgtccgttctgacaggttgtggtcatttgatttgcgacacttgtatcgagcccttcatcgaagagtcatccatgctacctcaggccaagaaaaccaaaggtggggcatttgctatcccatgcaaagattgtcaacgtttgacaaacgagaaagatattgtttcgcacaagttatacgaccaggtaataaaccagggatttactgaggaagatttgcatgcagagtatttaagtgaaatggagaaacaaaaaatacagcaaaaaaatgtatatgtgccaaattttgagagtttagaaccatctacgaagatagagcaatgtatacaggttattcaaagagtttttgatgaatcagcaaccgaaaaaattattattttttcccagtttacaacattttttgagattctcgaacattttctcaaaaataaactgaattttccctacttgaaatatattggatcaatgaacgctcagagaagatcagatgttatcaacgaattttatcgtgaccctgagaaaaggatacttctgatttccatgaaagccggtaactcaggactaacattgacatgtgcgaaccatgtagttatagttgatccattttggaatccttacgtcgaagaacaagctcaagaccgttgctatagaattagtcaaacaaaaaaagtccaggtgcataaattgtttataaaggactctgttgaggatcgtatttctgaattacagaagagaaagaaggaaatggtcgattctgccatggacccaggcaagataaaggaagtgaatagtttagggcgtcgggagttaggatttttatttggtttaaacgctctttga

SEQ ID NO: 10500 - DNA, 4860 bp, Artificial Sequence
  Description of Artificial Sequence: Synthetic polynucleotide
atggcagcagtacccaccatcgaccttacattggccgattctgataatgaagacatattccattctttttcttcttctacaagtgtggataagatagacattaggaaagaaaatgggaaattaagaatggcaggcttggaagtcgcccaatctaatgacgatgcagcacgtcaagcattccatgttttcaagacgaacatatccaataatgaaaccttcgatactattctttccaagagcaagacaatcacagacagtaccttcaacaatgaaaaatcttccaacgaagtaaaacagcagcaagtcttgaaggaagaaacgatgggatcttccaacgatgagaagaaaacacaagagagcagcccaagcgcagagatgataaaacttttttatgaaaacgatgatgtgccgttatccgatagttttaaacaaaaagaggaaggtaaaagaataaatcaggatgagcaagtgaaggaaaatatctgtggcatttcttcctcttacgtctccaaagactacgatggcgttgaagatgatttcgagcctaatacttgccaggacagcaatttggattttcaagaggagaagttaaacttgaataacaaaccgtctcagcaacagttcagcgacccagaaacaaaagataacagtttgaagagcgaaaacaaagaccaaataaaaggagtcacaacaacaagttatcgtgatttacctattgaatctagtgctttccaggattctgaaactcaaaataactccaaaaacactatacctaacatcgtaaatgaaaagagaacgccagcattaccgtccaatttgagctctgttgagagttcccttaaaaacgagacggccaaagtagaggggaagacgaccgttcgtcttccaggacttcaaaataatgttgccttacttgagcaagaacaaagtgaattattcaagcactttagtgaacaacctgtcgatattagcgattttggtcgtaagattaaaaggaagcatagcggagattttgcagataacaagatacttaaaagaccgatattgccctctaaaaatatggaccacacaacacataattctcatgattccgaacagaaaaatagctctattattattctttctgatgaggacgaatctggtgccggtatcaatgatatagaaagtcctttgaaagtttctgaaccaaatacagctgatgcgcttaggagcagtgtaccagaagtcatatctttacttgacttgcccaatattgacttgaataactctgtaataaaagaagcaagtggcagcaattctattcctacaagtgaaacagacgcacaatcctccagttcttctgttcttcaaggaactatcatgacagaacaagctactcaatcctctcaacacgaatgtaacagttctcttgatactttgaaaaaaaatcatcaaaaattattgaaggatttgaattctagagagtctgaattgcgtaatgctctcagttgctgcaagacaaactctgaaattttaagaaggaaattaagtagaagagaaaaggaggtctctgatgctgaaaaacattggcagttattgttgacatctatggctagagggggaagaactatcagctctactcagcagatattagttgatgaagctgagaaccaattaaacaaattgaaggaaaaaagacagttgacaaaatccaagttggattctatcaatttgaaaatgtataattataacgaacaatggaagtcctttgtgcattctaaaaatataaacttacagaaatctttggctgcccttgagagatctgccagggatagtaaagcttctgcgaccgtaaataaaagaaacgaatgccttgctgagaaagaaaagttggaccaaatgttaaaagaaggaaccttgagcttcagtacctacaagcagttaacaggggagatccagcagaaattgaatgacttgaaattgggggaccaacgcacaactgatatcaatagtgtattgccaatagtaaggcaacctctcgccaaaagagatttatttattaagtccattgatactgcaaaagatttattagccaagaacacatccaggacagaaatgacgaagagaattctttatagacatttggacaacttggtctcttataaaaacttttttgaagacggaagatccttaatagatataaacagaagacacgttgcacatgaaagtgcccaaatattgttcaccaacggtgtaaagatgcccattgtttttgaaacattacaagattacggcatcaagttttctaatccagccattgtcaatcctgacagaagagcccaatattttaaaagcatcgaagttgcacgcgatctcatatccaagtctactagaagtgaggatgctaaaagaaagattactagatttttgaatataattgaagaatttcgtaaagatattgacaccggatttccacctactcctttaaaaagggaaggcgtcggaaaagctgttgttgggttgagacaacaaggacttaagatggacagattatatgaaaatttgagaagatataagattccaataacaagtgaagaattattgcagcaaagctatttatttccggtaaacgcagatcaaagacctccttccaactggaacatcgtggaaaataccgaagatactagttctacagccaatgatttatctatgcaagatgaatttcacatctctaatatgcatgcagcagaagatcaagaacagattagggctcttttagagaatgtcaaacaatctgaatccattatagacggcgaagcacttactcccgaggatatgaccgtaaacttattaaaacaccagaggcttggtttgcattggttgttacaagttgaaaactccgcaaaaaaagggggtttacttgctgacgatatgggcttgggtaaaacgattcaagctattgcattgatgttagcaaatcgcagtgaggaatccaaatgtaaaaccaatttgatcgtcgcaccagtcagtgtcttgagagtttggaaaggtgaattagaaacgaaagtaaaaaaacgcgcaaaatttactacatttatttttggaggatctggtaacggaaaagttaagcactggagggatttggcaagatatgatgctgttttggtatcttatcaaactttggcaaacgaatttaagaaacattggccgaaaaaattggatggtgaacaaaatcagttaccagctgtgcctcatatacaagctcttaataggttgaaaacctctaatgaatactactctccatttttctgcaatgattctacgttttacagaattttattagacgaaggccaaaacatcaagaacaaaaatacaagggcttctaaagcgtgctgtactataaatggaatgtataggtgggtcttgtctggtacgccgattcaaaatagtatggatgagctttattccttgataagatttttaagaattccaccctaccacaaggagcaaagatttaaattagacattggaaggttttttcagagaaataagcaatatcaatatgataacgaggatagaaaaaacgcattaagaaaggttagagtccttttgaatgccattatgcttcgtcgttctaaggctgataagatcgacggcaaacctttattggagctccctcctaaaattgtggaagtagatgaatctcgcttgaagggagaggaattaaaattttacacagctttggaaagtaaaaatcaagcactcgctaagaaattgttgaacaattctacgagggggagctactctagcgttctcacattattacttcgcttaaggcaggcttgttgtcattctgaattagttgtgatgggagaaaaaaaagcggaaggtacaaaggtagctaacggcaaaagctttgaagatgactggctcaggctctactataaaatcactcacatgagcggagaagcgcaggctcaggttattacttctatgaattctatgacatgtttctggtgcatggaacaattagaaccagaagcgatgtccgttttgacaggttgtggtcatttgatttgcgacacttgtatcgagcccttcatcgaagagtcttccatgttgcctcaggccaagaaaaccaaaggtggggcatttgctatcccatgcaaagattgtcaacgtttgacaaacgagaaagatattgtttctcacaagttatacgaccaggtaataaaccagggatttactgaggaagatttgcatgcagagtatttaagtgaaatggagaaacaaaaaatacagcaaaaaaatgtatatgtgccaaattttgagagtttagaaccatctacgaagatagagcaatgtatacaggttattcaaagagtttttgatgaaagtgcaaccgaaaaaattattattttttcccagtttacaacattttttgagattctcgaacattttctcaaaaataaattgaattttccctacttgaaatatattggatccatgaacgctcagagaagaagtgatgttatcaacgaattttatcgtgaccctgagaaaaggatacttttgatttccatgaaagccggtaactctggattaacattgacatgtgcgaaccatgtagttatagttgatccattttggaatccttacgtcgaagaacaagctcaagaccgttgctatagaattagtcaaacaaaaaaagtccaggtgcataaattgtttataaaggactctgttgaggatcgtatttctgaattacagaagagaaagaaggaaatggtcgattctgccatggacccaggcaagataaaggaagtgaatagtttagggcgtagagagttaggatttttatttggtttaaacgctctttga

SEQ ID NO: 10501 - DNA, 1800 bp, Saccharomyces cerevisiae
atgagtttcggtacgagaatctccagggctttgagatttttggaaattcctgttaaaaatagggcctccgtgaattttttaaggaaccctgatttgcaacctatcaagtctgttaatcaaacgtgggggttttggtctaattttgcgtattggggtgttctgtccttcaacgttggtatgtggataggcggttcgtctgcattaactgttgggttaagttactcagagaccatcggtgcgtttattattgctgatttgttgaccatcctgtttgctttagccaactcttgtcctggctatgactggaaggtcggcttcactctagctcaaagattcgtctttgggatttacggttcagctcttggtatcattatcagaatattgatgagtattgtctattatggttccaacgcttggttaggtgggctttgtgtaaacatgatattagattcttggtctcaccactatttgcatctgcccaatactttgtcctcgaaagttgccatgaccaccaaggaattgatcggcttcattatcttccatatccttaccgcgttctgttactttatgaagccataccatatgaactatattttaatttggtcgtgtgttggtactttcttcgccatgttgggtatggtaatttacttaactaagagcgcacatggtgttggtgacttgttcacttctactcattccacagttactggctctaaaaaggcttgggcttgggtttatacgatctcgtactggtacggttctgtttctccaggctgtaccaatcaaagtgacttctccagatttggttcctctaattgcgctatctggactggtactatagttgctttactaataccagcaaccttgatcccagtattcggtatcattggtgcttctgcttgtgaaaaattatacggtcaaacattttggatgcctatggacatctttgacaactggttgacaactaactattctgcaggcgcgcgtgcagctacattcttctgtggtttttgttttgtaatgtctcaaatttcatataccatctccaactgtgggtttgccagtggtatggatttggctggtttattaccgaaatatgttgatattaagagaggtgctatttttgccgcatgcgtctcctgggcctgtttgccatggaacttttacaactcttcttctactttcttgactgttatgagctctttcggtgtcgtaatgacacctattatcactgtcatgatctgtgataatttcctcatcaggaagagacaatactccgttaccaatgcctttgttctaaagggtgaatactattttaccaagggtgtcaactggagagctatcgttgcctgggtgtgtggtatggctcccggtctacctggtatcgcttgggaagtcaataatgactatttccacaacactggtattataaattttttctatggtgattctttcttctcctttttgatttcctttttcgtctattggggactatgcctcctcttcccattcaaaattactgtcaaacatgatgacaaagattactacggtgcgtttaccgacgaagaagcaaggaagaagggcatggttccatacagtgaaatttctgaagaagaaatccgtgcttacacattaggcgaatgcttcacaagtggacacgaatacaaacctgagagctccgatgatgaactacctgagttgacaaaaactagttcagaaaacacaaaagtgtttgaaattgttcatcagaaagataatgaaaaggaatcctctacttccagtgaaaaacaaattgcctaa

SEQ ID NO: 10502 - DNA, 1800 bp, Artificial Sequence
  Description of Artificial Sequence: Synthetic polynucleotide
atgagtttcggtacgagaatctccagggctttgagatttttggaaattcctgttaaaaatagggcctccgtgaattttttaaggaaccctgatttgcaacctatcaagtctgttaatcaaacgtgggggttttggtctaattttgcgtattggggtgttttatccttcaacgttggtatgtggataggcggttcttctgcattaactgttgggttaagttactctgagaccatcggtgcgtttattattgctgatttgttgaccatcttatttgctttagccaactcttgtcctggctatgactggaaggtcggcttcactttggctcaaagattcgtctttgggatttacggttctgctcttggtatcattatcagaatattgatgagtattgtctattatggttccaacgcttggttaggtgggctttgtgtaaacatgatattagattcttggtctcaccactatttgcatctccccaatactttgtcctctaaagttgccatgaccaccaaggaattgatcggcttcattatcttccatatccttaccgcgttctgttactttatgaagccataccatatgaactatattttaatttggtcttgtgttggtactttcttcgccatgttgggtatggtaatttacttaactaagagcgcacatggtgttggtgacttgttcacttctactcattccacagttactggctctaaaaaggcttgggcttgggtttatacgatctcctactggtacggttctgtttctccaggctgtaccaatcaaagtgacttctccagatttggttcctctaattgcgctatctggactggtactatagttgctttattgataccagcaaccttgatcccagtattcggtatcattggtgcttctgcttgtgaaaaattatacggtcaaacattttggatgcctatggacatctttgacaactggttgacaactaactattctgcaggcgcgcgtgcagctacattcttctgtggtttttgttttgtaatgtctcaaatttcttataccatctccaactgtgggtttgccagtggtatggatttggctggtttattaccgaaatatgttgatattaagagaggtgctatttttgccgcatgcgtctcctgggcctgtttgccatggaacttttacaactcttcttctactttcttgactgttatgagctctttcggtgtcgtaatgacacctattatcactgtcatgatctgtgataatttcctcatcaggaagagacaatactccgttaccaatgcctttgttttgaagggtgaatactattttaccaagggtgtcaactggagagctatcgttgcctgggtgtgtggtatggctcccggtttgcctggtatcgcttgggaagtcaataatgactatttccacaacactggtattataaattttttctatggtgattctttcttctcctttttgatttcctttttcgtctattggggattatgcctcctcttcccattcaaaattactgtcaaacatgatgacaaagattactacggtgcgtttaccgacgaagaagcaaggaagaagggcatggttccatacagtgaaatttctgaagaagaaatccgtgcttacacattaggcgaatgcttcacaagtggacacgaatacaaacctgagagctccgatgatgaattacctgagttgacaaaaactagttctgaaaacacaaaagtgtttgaaattgttcatcagaaagataatgaaaaggaatcctctacttccagtgaaaaacaaattgcctga

SEQ ID NO: 10503 - DNA, 237 bp, Saccharomyces cerevisiae
atgatgataataatatttatagaattgtgtagaattgcagattccctttcatggattcctaaatccttgaggagaacttctagtacattctacatacctaatattattgccttattaaaaatggaatcccaacaattatctcaaaattcacccacttttcaaaaacacacgccgattggtcatattaatcatgaccaatataatagtgattccggtagttactatacattgatgtga

SEQ ID NO: 10504 - DNA, 237 bp, Artificial Sequence
  Description of Artificial Sequence: Synthetic polynucleotide
atgatgataataatatttatagaattgtgtagaattgcagattccctttcttggattcctaaatccttgaggagaacttctagtacattctacatacctaatattattgccttattaaaaatggaatcccaacaattatctcaaaattctcccacttttcaaaaacacacgccgattggtcatattaatcatgaccaatataatagtgattccggtagttactatacattgatgtga

SEQ ID NO: 10505 - DNA, 1131 bp, Saccharomyces cerevisiae
atgacatccgatcctgttaatacgaatataagtagccccactttaacggacagaaatgcagacgaatcatgggagctcttgaaaagagagtttaacacattatttagcaacctgaaaactgacagtaaagaagaaggtaatttcacagacaacaaaggagtaatcgccaagaaaccaattgttctgcaggataatgatgattcggattttacgcagaatcagggaaaagttgctactgcaaccagtacaactagtgacagaagctttaagcgaacacttggttctattgaaatgaaaaaacgttatgttaagaaaaattgccaagcaaaatttgtttttaacacgcttgaaggtaaagaagtttgttcgaaaatactacaacataccctaggcctattaagtttattgctattgacgagaaagatacgactactaaatttttcctcaaaactgcgattggtgattcaacaattgagtttatttcggtactatttgagattcggaaactttgcgatcaatttatataaaattatcaaaagatttcgctggttgagagaaatgaaaaaactacattataaagatcaatcaattttattttattttaaaaatttccggtttttcgacattattgaagctttttataatttgacagatgagttgatactgttccataagctacaatcaatgtttggtaaaaagaacacatcacatgcaaatactaatagactaatgacattcgtcaaagaacagcactatatcttatgggaagttttaaatattcttgctatcaataaaaacattgaacaatggcgacagctaataagagatgaaatttatttaagtatctataataccagtggtaatgcaataaaggaatacgagttaaagtacaaactacctaccaatgacaaagtcaatttggagttacggaaaaataatattacattggatttttataagataatactaaacttattgtctaatctaattaatattaaaggtaaaagggacaaatataactcagagctagcttacgaaataatttcagtaggttccggtgttactgaactccttaagctatggaaccgagccaaagtcacttcggctaatgaacatacaagcgctgtttga

SEQ ID NO: 10506 - DNA, 1131 bp, Artificial Sequence
  Description of Artificial Sequence: Synthetic polynucleotide
atgacatccgatcctgttaatacgaatataagtagccccactttaacggacagaaatgcagacgaaagttgggagctcttgaaaagagagtttaacacattatttagcaacttgaaaactgacagtaaagaagaaggtaatttcacagacaacaaaggagtaatcgccaagaaaccaattgttttacaggataatgatgattctgattttacgcagaatcagggaaaagttgctactgcaaccagtacaactagtgacagaagctttaagagaacacttggttctattgaaatgaaaaaacgttatgttaagaaaaattgccaagcaaaatttgtttttaacacgcttgaaggtaaagaagtttgttctaaaatattgcaacataccttaggcttattaagtttattgttgttgacgagaaagataagattattgaatttttcctctaaacttagattggtgattcaacaattgagtttatttagatactatttgagattcggaaactttgcgatcaatttatataaaattatcaaaagatttcgctggttgagagaaatgaaaaaattgcattataaagatcaatctattttattttattttaaaaatttcagatttttcgacattattgaagctttttataatttgacagatgagttgatattattccataagttacaatctatgtttggtaaaaagaacacatctcatgcaaatactaatagattaatgacattcgtcaaagaacagcactatatcttatgggaagttttaaatattcttgctatcaataaaaacattgaacaatggagacagttgataagagatgaaatttatttaagtatctataataccagtggtaatgcaataaaggaatacgagttaaagtacaaattacctaccaatgacaaagtcaatttggagttaagaaaaaataatattacattggatttttataagataatattaaacttattgtctaatttaattaatattaaaggtaaaagggacaaatataacagtgagttggcttacgaaataattagtgtaggttccggtgttactgaactccttaagttatggaacagagccaaagtcactagtgctaatgaacatacaagcgctgtttga

SEQ ID NO: 10507 - DNA, 861 bp, Saccharomyces cerevisiae
atgtcgaatgcagaggccagcagagtgtacgagattatcgtagagtctgtggtaaatgaagtaagagaggactttgaaaatgcgggtatcgatgaacaaactttacaagacctaaaaaatatttggcaaaaaaagctcacagagacgaaggtaactactttttcatgggacaatcagttcaatgaaggaaatatcaatggtgtacagaacgacttaaatttcaatcttgctacccccggcgtaaattctagcgagttcaatattaaggaggagaataccggtaatgaaggtctaattttgccaaatatcaattccaacaacaacataccgcactctggagagaccaatattaatacgaatacggtagaagcaactaataattcaggtgctaccttgaacacaaatactagtggtaatacaaatgcggacgtaactagccagcctaaaattgaagtaaaaccggaaatagaacttactattaataatgccaatataactaccgtcgaaaacatagatgatgaaagtgagaagaaagacgacgaggaaaaggaggaggacgtggaaaaaacccgcaaggaaaaggagcagatagaacaagtaaaattacaagcgaagaaggaaaaaagaagtgcattattagatacggatgaggtcggttcagaactagatgattccgacgatgactatctaatttcggagggtgaagaggatgggccagatgagaacttaatgctgtgcttatatgataaagtcacaagaacaaaggcgagatggaaatgtagtctgaaagatggtgtggtgaccatcaatagaaatgactacacattccaaaaagctcaagtggaagcggagtgggtataa

SEQ ID NO: 10508 - DNA, 861 bp, Artificial Sequence
  Description of Artificial Sequence: Synthetic polynucleotide
atgagtaatgcagaggccagcagagtgtacgagattatcgtagagtctgtggtaaatgaagtaagagaggactttgaaaatgcgggtatcgatgaacaaactttacaagacttgaaaaatatttggcaaaaaaagctcacagagacgaaggtaactactttttcttgggacaatcagttcaatgaaggaaatatcaatggtgtacagaacgacttaaatttcaatcttgctacccccggcgtaaattctagcgagttcaatattaaggaggagaataccggtaatgaaggtttgattttgccaaatatcaattccaacaacaacataccgcactctggagagaccaatattaatacgaatacggtagaagcaactaataattctggtgctaccttgaacacaaatactagtggtaatacaaatgcggacgtaactagccagcctaaaattgaagtaaaaccggaaatagaacttactattaataatgccaatataactaccgtcgaaaacatagatgatgaaagtgagaagaaagacgacgaggaaaaggaggaggacgtggaaaaaacccgcaaggaaaaggagcagatagaacaagtaaaattacaagcgaagaaggaaaaaagaagtgcattattagatacggatgaggtcggttctgaattagatgattccgacgatgactatttgatttctgagggtgaagaggatgggccagatgagaacttaatgttgtgcttatatgataaagtcacaagaacaaaggcgagatggaaatgtagtttgaaagatggtgtggtgaccatcaatagaaatgactacacattccaaaaagctcaagtggaagcggagtgggtatga

SEQ ID NO: 10509 - DNA, 2466 bp, Saccharomyces cerevisiae
atgaacgaagttcctaccactccagttaggcttattttagggcaagctcagcaacgcgagcagaattcagaaaactgttcgcaagaacgtaacccacgcacgtttaattccgaaccggattccagctttaactctcctggttcctcccagttcgtgatacatcctcatgaaccgctcgagaaggagaaagatgagaagcaggatttagaccgctcgattgattacggtaggtcatcagctcttaacaacaagaataatgccaatccattagagaatatagacataaataaaatgtttgatgacaaaaaatcagattcaggtaccaatgatgataaaggaggcgcaagtactagtgataagcatgtccttgcattgaattattcaccgatcagagttgaaatgaactcctcagagaaacgaagcgacaaaaacgtggacgtagatgaaaatgataaagaaggtagccatattaataaaaaattgaaattgcagttagaatcagtacctgatttgaaacaaagctctactaaagatatcattaatgacaaagaagaaattatgtcgtctccaatggcgattgatatgattgagaccaacataagcccaaataaattcataataaacgacggagttgaaagaaacgatagtttcaatatcaataccgacacacttaaattagaaaatgatataaatgagaaacaacaagaggaagacttcataaaatctaacagtaacaatgtggttaatattgacaatgcttataaggaaaaggaggacgaagaaaatgatataacaaattctcatataaacaggcttactcctttgtatgagacttctgcaagggagtcgaactcaaatgaagaggggaggaatgactacgatgatgacaaccaacttgatattagacatgacaattttcagattgtagcaaaaagaaacgaggagctcactgatcagatatatcacttaaatcaaatgttaaactctttgatttccaaaaatgaatcattgtcttttcaatacgagaaattgaacaaaaatcaccaactactaatagatttgacaaatgaaaagttagataaactaaatacagaaagagagagcgatattgccaaggtggaaaaattcaaaaagaggattaaggagttgaatacagaaattaaggtattgaattccaaccaaaaaatattacaagaaaaattcgatgcctcaattactgaagtaaatcatataaagggcgaacatgaaaatactgtcaacactttgcagcaaaatgagaaaattttaaatgataaaaatgtagaactggaaaatatgaaagcagaattgaaaggcaataatgataaattatccgaatatgagaccacgttaaatgacttgaattctcgcattgtgcaactgaatgataagattgaaagcacagatattgttttgaaatctaaagagaacgaactagataatttaaaattgagtttgaaggaaactttatcgatttctaaggacttcaacgactctgaccttataggacaaattaatgagctaatatctacaaaaaacaacttgcaacaaaaaatggatgatttgaataacctgaacgacgataatttgaaggtagtacaggataaattaattaaaaatgaggagacgctaaaactaaaagaagctgaaattgattcattgaatagtgaaatggacgagctaaaaaaacagatcacttcaaaagatgatgaatttaagatgtggcaaagtaaatacgaaactgtcgaagacgaagctaagatacgcaatgccgaagttacagagttgaacggagatattgaagatctaaaggaatcaaaattgcatttggaagaaacaattacggaactagaaaacaaagttcataaactagaaaatgagtgtgaactggagaaacaaaaattcgaaaaaacttcgctagaattagaaagcttacaactaaaaaatagtaacattcaggctgagcacatcaaagaattggaaaatcttcatgaaaaccttatttctcttcaaaatgaattgaagatttcatccgacaggataacaacattaacaaaagaaaatgaagtattaatggaacaaaataataataacaataatagcgttactttaagcaatgatcaaaaggatagagatgatgaaaaaattaaatcattaggaaaacaagtacaagattggaaagaaaagtatgaggccaaagaaaaagatacaaataaaaggctaaagttattagcagaagatttgtatatccagtattcatccaaacacgaacaaaaggtcaaactgttgaaaaaaggctatgaaaacaagtaccaaaataagtttgatcaattaaatttagaaaataaaactctgtcagaagaaatcgagcaattgaacaagcagctgtcttcagaaagagaagaaaagcaggagttactcaagttgttagaaaatgaaaaaaaataa

SEQ ID NO: 10510 - DNA, 2466 bp, Artificial Sequence
  Description of Artificial Sequence: Synthetic polynucleotide
atgaacgaagttcctaccactccagttaggcttattttagggcaagctcagcaacgcgagcagaattctgaaaactgttctcaagaacgtaacccacgcacgtttaattccgaaccggattccagctttaactctcctggttcctcccagttcgtgatacatcctcatgaaccgctcgagaaggagaaagatgagaagcaggatttagaccgctccattgattacggtaggagttctgctcttaacaacaagaataatgccaatccattagagaatatagacataaataaaatgtttgatgacaaaaaatctgattctggtaccaatgatgataaaggaggcgcaagtactagtgataagcatgtccttgcattgaattattctccgatcagagttgaaatgaactcctctgagaaaagaagcgacaaaaacgtggacgtagatgaaaatgataaagaaggtagccatattaataaaaaattgaaattgcagttagaaagtgtacctgatttgaaacaaagctctactaaagatatcattaatgacaaagaagaaattatgtcttctccaatggcgattgatatgattgagaccaacataagcccaaataaattcataataaacgacggagttgaaagaaacgatagtttcaatatcaataccgacacacttaaattagaaaatgatataaatgagaaacaacaagaggaagacttcataaaatctaacagtaacaatgtggttaatattgacaatgcttataaggaaaaggaggacgaagaaaatgatataacaaattctcatataaacaggcttactcctttgtatgagacttctgcaagggagagcaacagtaatgaagaggggaggaatgactacgatgatgacaaccaacttgatattagacatgacaattttcagattgtagcaaaaagaaacgaggagctcactgatcagatatatcacttaaatcaaatgttaaactctttgatttccaaaaatgaatctttgtcttttcaatacgagaaattgaacaaaaatcaccaattattgatagatttgacaaatgaaaagttagataaattgaatacagaaagagagagcgatattgccaaggtggaaaaattcaaaaagaggattaaggagttgaatacagaaattaaggtattgaattccaaccaaaaaatattacaagaaaaattcgatgcctctattactgaagtaaatcatataaagggcgaacatgaaaatactgtcaacactttgcagcaaaatgagaaaattttaaatgataaaaatgtagaattggaaaatatgaaagcagaattgaaaggcaataatgataaattatccgaatatgagaccacgttaaatgacttgaattctcgcattgtgcaattgaatgataagattgaaagcacagatattgttttgaaatctaaagagaacgaattagataatttaaaattgagtttgaaggaaactttatccatttctaaggacttcaacgactctgaccttataggacaaattaatgagttgatatctacaaaaaacaacttgcaacaaaaaatggatgatttgaataacttgaacgacgataatttgaaggtagtacaggataaattaattaaaaatgaggagacgttgaaattgaaagaagctgaaattgattctttgaatagtgaaatggacgagttgaaaaaacagatcacttctaaagatgatgaatttaagatgtggcaaagtaaatacgaaactgtcgaagacgaagctaagatacgcaatgccgaagttacagagttgaacggagatattgaagatttgaaggaaagtaaattgcatttggaagaaacaattacggaattggaaaacaaagttcataaattagaaaatgagtgtgaattagagaaacaaaaattcgaaaaaacttctttggaattagaaagcttacaattgaaaaatagtaacattcaggctgagcacatcaaagaattggaaaatcttcatgaaaaccttatttctcttcaaaatgaattgaagatttcttccgacaggataacaacattaacaaaagaaaatgaagtattaatggaacaaaataataataacaataatagcgttactttaagcaatgatcaaaaggatagagatgatgaaaaaattaaatctttaggaaaacaagtacaagattggaaagaaaagtatgaggccaaagaaaaagatacaaataaaaggttaaagttattagcagaagatttgtatatccagtattcttccaaacacgaacaaaaggtcaaacttttgaaaaaaggctatgaaaacaagtaccaaaataagtttgatcaattaaatttagaaaataaaactttatctgaagaaatcgagcaattgaacaagcagctttcttctgaaagagaagaaaagcaggagttactcaagttgttagaaaatgaaaaaaaatga

SEQ ID NO: 10511 - DNA, 1245 bp, Saccharomyces cerevisiae
atgtatagacgatctgttggagtactatttgttgggagaaatacaagatggatttcgtccactattaggtgtggaacgagcgcaactcggccaataagatccaatgcattgaatactgattcagataacgctagcgttagggtaccagttggaaattcaactgaggttgaaaatgcaaccagtcagttaacagggacttcgggaaaaagacgcaaggggaacagaaaaagaattacagagttcaaagatgctcttaatttgggtccatcttttgcagattttgtttcaggtaaagcttcgaaaatgatcttggaccctctggagaaggcaaggcaaaatacagaggaagctaaaaaactacctcgttggcttaaggttcctattcctaagggtaccaattaccataaattgaaaggcgacgtaaaagaattaggcctgagtactgtttgtgaggaggcaagatgtcccaatattggtgaatgttggggaggcaaagataaatctaaggcaacggcaacaattatgctgcttggtgatacttgcactcgtggatgtaggttttgttctgtgaagaccaatagaacgcctagtaagccggacccaatggagcccgaaaatactgccgaagctatcaaaagatgggggttgggttatgttgttttaactaccgttgatagggacgatttagtcgatggtggtgctaatcacctggccgagacggttcgcaaaatcaaacagaaggcaccaaatactcttgtagagactctttctggtgatttcagaggtgatttgaagatggtggacattatggcacaatgtgggcttgatgtttacgcacataatttggaaacagttgaatcactaacaccacatgtcagagacagaagagctacttatagacagtctttgagtgttttagaaagggcaaaagctacggttccgtcactgattactaaaacatcaataatgctgggtctaggagaaactgatgagcaaattactcaaactttgaaggatttgcgcaatattcaatgtgatgttgttacatttggtcaatatatgaggccaaccaagagacatatgaaagtcgtagaatatgtgaaacccgaaaagtttgactactggaaagagagagctttagagatgggattcttgtattgtgcatctggacccctagtaagatcgtcatataaggctggtgaagcatttattgagaacgttttgaagaaaagaaacatgaaataa

SEQ ID NO: 10512 - DNA, 1245 bp, Artificial Sequence
  Description of Artificial Sequence: Synthetic polynucleotide
atgtatagaagatctgttggagtattatttgttgggagaaatacaagatggatttcttccactattaggtgtggaacgagcgcaactagaccaataagatccaatgcattgaatactgattctgataacgctagcgttagggtaccagttggaaattctactgaggttgaaaatgcaaccagtcagttaacagggacttctggaaaaagacgcaaggggaacagaaaaagaattacagagttcaaagatgctcttaatttgggtccatcttttgcagattttgtttctggtaaagcttccaaaatgatcttggaccctttagagaaggcaaggcaaaatacagaggaagctaaaaaattacctcgttggcttaaggttcctattcctaagggtaccaattaccataaattgaaaggcgacgtaaaagaattaggcttaagtactgtttgtgaggaggcaagatgtcccaatattggtgaatgttggggaggcaaagataaatctaaggcaacggcaacaattatgttacttggtgatacttgcactcgtggatgtaggttttgttctgtgaagaccaatagaacgcctagtaagccggacccaatggagcccgaaaatactgccgaagctatcaaaagatgggggttgggttatgttgttttaactaccgttgatagggacgatttagtcgatggtggtgctaatcacttggccgagacggttcgcaaaatcaaacagaaggcaccaaatactcttgtagagactctttctggtgatttcagaggtgatttgaagatggtggacattatggcacaatgtgggcttgatgtttacgcacataatttggaaacagttgaatctttaacaccacatgtcagagacagaagagctacttatagacagtctttgagtgttttagaaagggcaaaagctacggttccgtccttgattactaaaacatctataatgttgggtttgggagaaactgatgagcaaattactcaaactttgaaggatttgcgcaatattcaatgtgatgttgttacatttggtcaatatatgaggccaaccaagagacatatgaaagtcgtagaatatgtgaaacccgaaaagtttgactactggaaagagagagctttagagatgggattcttgtattgtgcatctggacccttagtaagaagttcttataaggctggtgaagcatttattgagaacgttttgaagaaaagaaacatgaaatga

SEQ ID NO: 10513 - DNA, 1299 bp, Saccharomyces cerevisiae
atgtatccaggtagtggacgttacacctacaacaacgctggtggtaataatggctaccaacggcccatggctcctccacctaaccagcagtatggacagcaatatggtcagcaatatgaacagcagtatggacagcaatatgggcaacaaaatgatcagcaattcagtcagcaatatgctccaccaccaggtcctccccctatggcttataacaggcctgtgtatcccccccctcaattccagcaggaacaggcaaaggcacaattaagcaacggctacaacaatcctaatgtaaacgcatccaatatgtacggtccaccccagaatatgtcattacctccacctcaaacacaaactattcaaggtacagaccaaccttatcagtattctcaatgtactgggcgtagaaaggctttgattatcggtataaactacataggttcaaaaaatcaactgcgtggttgtatcaatgatgctcataacatcttcaactttttgactaatgggtacggttacagttcagatgacattgtcatattaactgatgatcagaacgatttggtcagggttcccactagggctaatatgattagggccatgcaatggttggtcaaggatgcgcaacccaatgattctttgttccttcattattctggacatggtggccaaactgaagatttggatggggacgaagaagatgggatggatgatgttatatatccggtcgatttcgaaactcaagggccaattatcgacgatgaaatgcacgatataatggtgaagcccttacaacaaggtgttagactaacagcattgtttgactcttgtcattcgggtacagtgttggatcttccatatacctattctactaagggtattattaaggagcccaatatttggaaggatgttggccaagatggcctgcaagcagctatttcatatgccacaggaaacagggctgctttgattggttctttaggttctatattcaagaccgttaagggaggtatgggcaataatgtggatagagaacgcgtgagacagatcaaattctcagcagcagatgttgttatgttatcaggttcgaaggataatcaaacttctgcagatgctgtcgaagatgggcaaaatacaggtgcaatgtcccacgccttcatcaaggttatgactttacaaccacagcaatcatatttatctcttttacagaacatgaggaaagaattggctggtaagtattctcaaaaaccacaattatcatcgtcacaccctattgacgtaaatctgcaatttattatgtag

SEQ ID NO: 10514 - DNA, 1299 bp, Artificial Sequence
  Description of Artificial Sequence: Synthetic polynucleotide
atgtatccaggtagtggacgttacacctacaacaacgctggtggtaataatggctaccaaagacccatggctcctccacctaaccagcagtatggacagcaatatggtcagcaatatgaacagcagtatggacagcaatatgggcaacaaaatgatcagcaattcagtcagcaatatgctccaccaccaggtcctccccctatggcttataacaggcctgtgtatcccccccctcaattccagcaggaacaggcaaaggcacaattaagcaacggctacaacaatcctaatgtaaacgcatccaatatgtacggtccaccccagaatatgtctttacctccacctcaaacacaaactattcaaggtacagaccaaccttatcagtattctcaatgtactgggcgtagaaaggctttgattatcggtataaactacataggttccaaaaatcaattgcgtggttgtatcaatgatgctcataacatcttcaactttttgactaatgggtacggttacagttctgatgacattgtcatattaactgatgatcagaacgatttggtcagggttcccactagggctaatatgattagggccatgcaatggttggtcaaggatgcgcaacccaatgattctttgttccttcattattctggacatggtggccaaactgaagatttggatggggacgaagaagatgggatggatgatgttatatatccggtcgatttcgaaactcaagggccaattatcgacgatgaaatgcacgatataatggtgaagcccttacaacaaggtgttagattgacagcattgtttgactcttgtcattctggtacagtgttggatcttccatatacctattctactaagggtattattaaggagcccaatatttggaaggatgttggccaagatggcttacaagcagctatttcttatgccacaggaaacagggctgctttgattggttctttaggttctatattcaagaccgttaagggaggtatgggcaataatgtggatagagaacgcgtgagacagatcaaattcagtgcagcagatgttgttatgttatctggttccaaggataatcaaacttctgcagatgctgtcgaagatgggcaaaatacaggtgcaatgtcccacgccttcatcaaggttatgactttacaaccacagcaaagttatttatctcttttacagaacatgaggaaagaattggctggtaagtattctcaaaaaccacaattatcttcttctcaccctattgacgtaaatttacaatttattatgtga

SEQ ID NO: 10515 - DNA, 1413 bp, Saccharomyces cerevisiae
atgtcctcccaacaacacaagttcaagcgcccagatgtctccgttagagacaagaaattggacactcttaacgttcaattgaaaaaaatcgacactgaaatcggtttaattagaaagcaaatcgatcaacaccaggtcaacgataccacccaacaagaacgtaagaagttacaggataagaacaaggagatcatcaagatccaagctgacttgaaaacccgtagaagcaacattcacgactctattaagcaattggatgctcaaatcaagagaaaaaacaaccaaattgaggagaagttaggcaaaaaggccaagttctcgtccactgcagaagccaagcaaagaatcaatgagattgaagagtctattgcctctggtgacctttctttggttcaagaaaaactactagtcaaagaaatgcaatctttgaacaaattgattaaggacttagttaacatcgagccaatcagaaagtctgttgatgctgacaaggctaaaatcaatcaattgaaggaagaattgaacggattgaatccaaaggatgtctccaaccaattcgaagagaaccagcaaaaattgaacgatatccattcaaaaactcaaggtgtttacgacaaaagacaaactttattcaacaaacgtgctgccttgtacaagaagcgtgacgaattatacagtcaaatcagacagatcagagctgactttgacaacgaattcaaatcattcagagccaaattggacaaagaacgtttgaaacgtgaagaagaacaaagattatccaaacttttggaacagaaagatgttgatatgggtaaattgcaagaaaagttgactcatgccaagattccagccttcacttatgaaatcggtgccattgagaattctttgcttgtcctggacccaacttatgtgaaaccaaagaaaaacatcctgcctgacttgagtagcaatgctttggagaccaagcctgccagaaaagttgttgctgatgatttggttttggtcactccaaagaaggatgattttgtcaatgttgctccatctaaatctaagaaatacaagaagaagaaccaacagaagaacactgaaaatgagcaacctgcttctattttcaacaaagtcgatggcaagtttactttagaaccaacactaattgctactttggccgaattagacgtaactgtcccaatcaacagtgatgatgtcaagatcaccgttgagcaattgaagaagaagcatgaagagcttttgtcgaaacaagaagagcaaacaaaacaaaacattgaatctgtcgaaaaggaaattgagaaattaaatttggactactctaacaaagagcaacaagtaaaaaaggaattggaagaaaaaagattgaaagaacaggaagagtctgaaaaagataaagaaaattaa

SEQ ID NO: 10516 - DNA, 1413 bp, Artificial Sequence
  Description of Artificial Sequence: Synthetic polynucleotide
atgtcctcccaacaacacaagttcaagcgcccagatgtctccgttagagacaagaaattggacactcttaacgttcaattgaaaaaaatcgacactgaaatcggtttaattagaaagcaaatcgatcaacaccaggtcaacgataccacccaacaagaacgtaagaagttacaggataagaacaaggagatcatcaagatccaagctgacttgaaaacccgtagaagcaacattcacgactctattaagcaattggatgctcaaatcaagagaaaaaacaaccaaattgaggagaagttaggcaaaaaggccaagttctcttccactgcagaagccaagcaaagaatcaatgagattgaagagtctattgcctctggtgacctttctttggttcaagaaaaattattggtcaaagaaatgcaatctttgaacaaattgattaaggacttagttaacatcgagccaatcagaaagtctgttgatgctgacaaggctaaaatcaatcaattgaaggaagaattgaacggattgaatccaaaggatgtctccaaccaattcgaagagaaccagcaaaaattgaacgatatccattctaaaactcaaggtgtttacgacaaaagacaaactttattcaacaaacgtgctgccttgtacaagaagcgtgacgaattatacagtcaaatcagacagatcagagctgactttgacaacgaattcaaatctttcagagccaaattggacaaagaacgtttgaaacgtgaagaagaacaaagattatccaaacttttggaacagaaagatgttgatatgggtaaattgcaagaaaagttgactcatgccaagattccagccttcacttatgaaatcggtgccattgagaattctttgcttgtcttggacccaacttatgtgaaaccaaagaaaaacatcttacctgacttgagtagcaatgctttggagaccaagcctgccagaaaagttgttgctgatgatttggttttggtcactccaaagaaggatgattttgtcaatgttgctccatctaaatctaagaaatacaagaagaagaaccaacagaagaacactgaaaatgagcaacctgcttctattttcaacaaagtcgatggcaagtttactttagaaccaacattaattgctactttggccgaattagacgtaactgtcccaatcaacagtgatgatgtcaagatcaccgttgagcaattgaagaagaagcatgaagagcttttgagtaaacaagaagagcaaacaaaacaaaacattgaatctgtcgaaaaggaaattgagaaattaaatttggactactctaacaaagagcaacaagtaaaaaaggaattggaagaaaaaagattgaaagaacaggaagagtctgaaaaagataaagaaaattga

SEQ ID NO: 10517 - DNA, 1239 bp, Saccharomyces cerevisiae
atgacttccctgactaatgccgtgttcaaacgatacctggcagtgactcctagcgctcaccaagctcttaaaacgagaattaagaaaaagtcgtcatctttcgataagtttttcccacagcaaagcaatagtagaaaaaaacaatgggaaacgttgaatgaagacaaagcgtcgtggtttaaaaggaaatacgctcacgtacatgctagggaacaggaccgtgcagcggatccatatggcaagaaaaaggcccacgtcgagaagctaaaggagatcaagaatcaggcgaaattaaaccaaaagagccataaatccaagttccagaataaggacattgctctgaaacttatgaatgataatcctatcttcgaatatgtctacggcaccaacagcgtttatgcagcgttgctgaacccgagtagaaattgccattctcggttgctgtaccatggcactattcctagtaaatttcttcagatagtcgatgaactgaaggttacgacagagctggtggacaagcacagattaaacttgttgaccaattacggggtgcacaataacattgctcttgagacaaaacctttgcagcctgtggagattgcgtacctaggcgacatggacaccagttcagcagcattaagcattcacgagctgggcttcaataacgaaaatatacctcatgaactgccttatggtacgaaaacagacgctaagaagtttcctctcgggttatatctggatgaaataactgaccctcacaatatcggtgccattattagaagcgcttacttcctgggggttgacttcattgtgatgtcgagaagaaactgctctcctttgacgcctgtggtgtccaagacaagcagtggggccctcgaacttctgcccatattttacgttgataaaccgttagagttttttactaaatcacaagaaatgggtggctggacgtttattacaagccacttagctaatgccacgtcagaaaaatacactgttggaaaaactattagcatgcacgatttgaacggattatgtaacgagctgcctgttgttctagtggtggggaacgaaagccagggcgtaagaacgaatttgaagatgaggagtgacttcttcgtcgaaattccctttggtggcattgagaaaggcaatcgggccccagaacccattgttgactcactaaacgtaagcgtggctactgcattgttaatagataatattctaacttgtaaataa

SEQ ID NO: 10518 - DNA, 1239 bp, Artificial Sequence
  Description of Artificial Sequence: Synthetic polynucleotide
atgacttccttgactaatgccgtgttcaaaagatacttggcagtgactcctagcgctcaccaagctcttaaaacgagaattaagaaaaagagttcttctttcgataagtttttcccacagcaaagcaatagtagaaaaaaacaatgggaaacgttgaatgaagacaaagcgtcttggtttaaaaggaaatacgctcacgtacatgctagggaacaggaccgtgcagcggatccatatggcaagaaaaaggcccacgtcgagaagttgaaggagatcaagaatcaggcgaaattaaaccaaaagagccataaatccaagttccagaataaggacattgctttgaaacttatgaatgataatcctatcttcgaatatgtctacggcaccaacagcgtttatgcagcgttgttgaacccgagtagaaattgccattctagattgttgtaccatggcactattcctagtaaatttcttcagatagtcgatgaattgaaggttacgacagagttggtggacaagcacagattaaacttgttgaccaattacggggtgcacaataacattgctcttgagacaaaacctttgcagcctgtggagattgcgtacttgggcgacatggacaccagttctgcagcattaagcattcacgagttgggcttcaataacgaaaatatacctcatgaattaccttatggtacgaaaacagacgctaagaagtttcctctcgggttatatttggatgaaataactgaccctcacaatatcggtgccattattagaagcgcttacttcttgggggttgacttcattgtgatgagtagaagaaactgctctcctttgacgcctgtggtgtccaagacaagcagtggggccctcgaacttttgcccatattttacgttgataaaccgttagagttttttactaaatctcaagaaatgggtggctggacgtttattacaagccacttagctaatgccacgagtgaaaaatacactgttggaaaaactattagcatgcacgatttgaacggattatgtaacgagcttcctgttgttttggtggtggggaacgaaagccagggcgtaagaacgaatttgaagatgaggagtgacttcttcgtcgaaattccctttggtggcattgagaaaggcaatagagccccagaacccattgttgactctttgaacgtaagcgtggctactgcattgttaatagataatattttgacttgtaaatga

SEQ ID NO: 10519 - DNA, 663 bp, Saccharomyces cerevisiae
atgacagagcagaaagccctagtaaagcgtattacaaatgaaaccaagattcagattgcgatctctttaaagggtggtcccctagcgatagagcactcgatcttcccagaaaaagaggcagaagcagtagcagaacaggccacacaatcgcaagtgattaacgtccacacaggtatagggtttctggaccatatgatacatgctctggccaagcattccggctggtcgctaatcgttgagtgcattggtgacttacacatagacgaccatcacaccactgaagactgcgggattgctctcggtcaagcttttaaagaggccctaggggccgtgcgtggagtaaaaaggtttggatcaggatttgcgcctttggatgaggcactttccagagcggtggtagatctttcgaacaggccgtacgcagttgtcgaacttggtttgcaaagggagaaagtaggagatctctcttgcgagatgatcccgcattttcttgaaagctttgcagaggctagcagaattaccctccacgttgattgtctgcgaggcaagaatgatcatcaccgtagtgagagtgcgttcaaggctcttgcggttgccataagagaagccacctcgcccaatggtaccaacgatgttccctccaccaaaggtgttcttatgtag

SEQ ID NO: 10520 - DNA, 663 bp, Artificial Sequence
  Description of Artificial Sequence: Synthetic polynucleotide
atgacagagcagaaagccttggtaaagcgtattacaaatgaaaccaagattcagattgcgatctctttaaagggtggtcccttagcgatagagcactccatcttcccagaaaaagaggcagaagcagtagcagaacaggccacacaatctcaagtgattaacgtccacacaggtatagggtttttggaccatatgatacatgctttggccaagcattccggctggtctttgatcgttgagtgcattggtgacttacacatagacgaccatcacaccactgaagactgcgggattgctctcggtcaagcttttaaagaggccttgggggccgtgcgtggagtaaaaaggtttggatctggatttgcgcctttggatgaggcactttccagagcggtggtagatctttccaacaggccgtacgcagttgtcgaacttggtttgcaaagggagaaagtaggagatctctcttgcgagatgatcccgcattttcttgaaagctttgcagaggctagcagaattaccctccacgttgattgtcttaggggcaagaatgatcatcaccgtagtgagagtgcgttcaaggctcttgcggttgccataagagaagccaccagccccaatggtaccaacgatgttccctccaccaaaggtgttcttatgtga

SEQ ID NO: 10521 - DNA, 1815 bp, Saccharomyces cerevisiae
atggctgaactgagcgaacaagtgcaaaatttaagcatcaacgacaacaacgagaatggttatgttcctcctcacttaagaggaaaaccaagaagtgccagaaataacagtagcaactacaataacaacaacggcggctacaacggtggccgtggcggtggcagcttctttagcaacaaccgtcgtggtggttacggcaacggtggtttcttcggtggaaacaacggtggcagcagatctaacggccgttctggtggtagatggatcgatggcaaacatgtcccagctccaagaaacgaaaaggccgagatcgccatatttggtgtccccgaggatccaaatttccaatcttctggtattaacttcgataactacgatgatattccagtggacgcctctggtaaggatgttcctgaaccaatcacagaatttacctcacctccattggacggattgttattggaaaacatcaaattggcccgtttcaccaagccaacacctgtgcaaaaatactccgtccctatcgttgccaacggcagagatttgatggcctgtgcgcagaccggttctggtaagactggtgggtttttattcccagtgttgtccgaatcatttaagactggaccatctcctcaaccagagtctcaaggctccttttaccaaagaaaggcctacccaactgctgtcattatggctccaactagagagttggccacccaaattttcgatgaagccaagaaatttacttatagatcctgggtcaaggcctgcgtcgtctacggtggttctccaattggtaaccaactaagagaaattgaacgtggttgcgatcttttagtcgctactccaggtcgtttgaatgacttgttggaacgtggtaaaatttctttggccaacgtcaagtatttggttctagatgaagctgatagaatgttggatatgggtttcgaacctcaaattagacatattgtcgaagactgtgatatgactcctgttggtgaaagacaaactctgatgttctcagctacttttcccgctgatatccaacatttggcccgtgatttcttaagtgactacatctttttgtctgttggtagagtcggttctacttcagaaaacattactcaaaaagtcttatacgttgaaaatcaagataagaagtcagccttattggatctattgtctgcatccactgacggtttgactttgatctttgtcgaaactaagagaatggcagatcaattgaccgatttcctgatcatgcaaaactttagagctaccgccattcatggtgaccgtacccaatctgagagagaacgtgccttggccgccttcagatctggtgccgctactttattggttgccacagctgtcgcagctagaggtctagatattccaaacgtcacccacgttatcaactacgatttaccaagtgatgtcgatgattacgtccatagaattggtagaactggtcgtgccggtaacaccggtcttgccactgcctttttcaacagtgaaaacagtaacattgttaaaggtttgcatgaaattttgactgaagctaaccaagaagtcccatcattcttgaaggacgctatgatgagtgctccaggtagcagaagcaacagccgtagaggcggtttcggtcgcaacaacaacagagattaccgtaaggccggaggcgctagcgcaggcggctggggctcttcaagaagcagagataactctttcagaggcggtagtggctggggtagcgattccaagtcttctggctggggtaacagcggtggttcaaacaactcttcttggtggtga

SEQ ID NO: 10522 - DNA, 1815 bp, Artificial Sequence
  Description of Artificial Sequence: Synthetic polynucleotide
atggctgaattgagcgaacaagtgcaaaatttaagcatcaacgacaacaacgagaatggttatgttcctcctcacttaagaggaaaaccaagaagtgccagaaataacagtagcaactacaataacaacaacggcggctacaacggtggccgtggcggtggcagcttctttagcaacaaccgtcgtggtggttacggcaacggtggtttcttcggtggaaacaacggtggcagcagatctaacggccgttctggtggtagatggatcgatggcaaacatgtcccagctccaagaaacgaaaaggccgagatcgccatatttggtgtccccgaggatccaaatttccaatcttctggtattaacttcgataactacgatgatattccagtggacgcctctggtaaggatgttcctgaaccaatcacagaatttacctctcctccattggacggattgttattggaaaacatcaaattggcccgtttcaccaagccaacacctgtgcaaaaatactccgtccctatcgttgccaacggcagagatttgatggcctgtgcgcagaccggttctggtaagactggtgggtttttattcccagtgttgtccgaaagttttaagactggaccatctcctcaaccagagtctcaaggctccttttaccaaagaaaggcctacccaactgctgtcattatggctccaactagagagttggccacccaaattttcgatgaagccaagaaatttacttatagatcctgggtcaaggcctgcgtcgtctacggtggttctccaattggtaaccaattgagagaaattgaacgtggttgcgatcttttagtcgctactccaggtcgtttgaatgacttgttggaacgtggtaaaatttctttggccaacgtcaagtatttggttttggatgaagctgatagaatgttggatatgggtttcgaacctcaaattagacatattgtcgaagactgtgatatgactcctgttggtgaaagacaaactttaatgttcagtgctacttttcccgctgatatccaacatttggcccgtgatttcttaagtgactacatctttttgtctgttggtagagtcggttctacttctgaaaacattactcaaaaagtcttatacgttgaaaatcaagataagaagtctgccttattggatttattgtctgcatccactgacggtttgactttgatctttgtcgaaactaagagaatggcagatcaattgaccgatttcttgatcatgcaaaactttagagctaccgccattcatggtgaccgtacccaatctgagagagaacgtgccttggccgccttcagatctggtgccgctactttattggttgccacagctgtcgcagctagaggtttggatattccaaacgtcacccacgttatcaactacgatttaccaagtgatgtcgatgattacgtccatagaattggtagaactggtcgtgccggtaacaccggtcttgccactgcctttttcaacagtgaaaacagtaacattgttaaaggtttgcatgaaattttgactgaagctaaccaagaagtcccatctttcttgaaggacgctatgatgagtgctccaggtagcagaagcaacagccgtagaggcggtttcggtcgcaacaacaacagagattaccgtaaggccggaggcgctagcgcaggcggctggggctcttctagaagcagagataactctttcagaggcggtagtggctggggtagcgattccaagtcttctggctggggtaacagcggtggttccaacaactcttcttggtggtga

SEQ ID NO: 10523 - DNA, 1671 bp, Saccharomyces cerevisiae
atgttgaatctgtgtcatgctcttcgaggcgtacgtcagttttcctgttctgtgattgtgaaagtgaaatgtgcgtcatgttccataaaactacaggatcaggatcctagtaaaccaggatattatacgaagccaaaaagtctacccgactcaaaactaaatcctgacctccaagatctgaagtatttgctattcagtcaagacatacagctctcgaaacaggcaactcaaaatgatcctgacctcaaaaccaaaagagatttactattgagagtgatttgcaaaaggtgcagtaatgcccttcatcataacaattataacccggaagagtttcccgaaagcacattaaatgatattctgaactacgtccccagaggctcaaatgttatgcatattgtcccctttgtagaatttcccttacatttagaccccaatgttttgaaacgaaatgatttagatactacattagtgttaacgaaaagcgatcaagtttttaaagataaaaatgctgtcagcaaaaaggttcctatattcatgaagcaatttttaaagaacactttaagaattgactcaaataaaacattcgccatatctgcgctgaaaaactggaacatatccatgttttacaactactttaaaaactacacatatttgctaggcaaccctaatgttggtaaatcaactttgatcaatactctactacagaaatatcttggatataaggttaaaattgattctactgggaaaattaactccccctctgaagaagtgatgcaagaagcttttacgaacccgaagaattttttcaagattcaagctgctggtgtatcacatattcccaatttaactagatccgtacaagcctaccaagttggaggtaaaatactttttgatcttccaggctattcaacttccacctccagattacgcctagaagaactaatcgacgagcgttggcttcaaaggctgcgaaaaaccgatttattcaatcggaagcatataaaacagaagacttatgagtctatgaagggcacatcacagggaggctgttataccgtgggagggattttctacctggtacctccgaaaggatccataaatcagattgtgaaatacataccaggaccatcaaaaacattcaagaacattgaaaaaggtattgatgtattcaactcgtgcaattcatcatctggcacacatccgttatcacggtattgtggaattaaaagcgttatatgcgaaaaaagccagtacaaaaggtacgcaatacctccatttattggaagtatagagatcgttctgaaagatataggatatattttattaaggacaactgggaggtatgagttcaaaggactacatgagatatggatacctaggggtatccaagtaggtataagggaaccgctagaaaacttgattgagtctggctaccagcgttacattgaaacaaatggtaaagagtcaagctgtcccagagatagaccgatcatcagttccctgtatgagatggccccggatgaagctgatactttgaacgcagtgaagaagtcgtatttagaaaaaaccgagaaagatttatctgctagaagatttgtcgacgatgatccttatgatttggttcaacacctagaaaaaaaaaagaatccctattggtactaccaatggtaa

SEQ ID NO: 10524 - DNA, 1671 bp, Artificial Sequence
  Description of Artificial Sequence: Synthetic polynucleotide
atgttgaatttatgtcatgctcttaggggcgtacgtcagttttcctgttctgtgattgtgaaagtgaaatgtgcgtcttgttccataaaattacaggatcaggatcctagtaaaccaggatattatacgaagccaaaaagtttacccgactctaaattgaatcctgacctccaagatttgaagtatttgttattcagtcaagacatacagctctctaaacaggcaactcaaaatgatcctgacctcaaaaccaaaagagatttattattgagagtgatttgcaaaaggtgcagtaatgcccttcatcataacaattataacccggaagagtttcccgaaagcacattaaatgatattttgaactacgtccccagaggcagtaatgttatgcatattgtcccctttgtagaatttcccttacatttagaccccaatgttttgaaaagaaatgatttagatactacattagtgttaacgaaaagcgatcaagtttttaaagataaaaatgctgtcagcaaaaaggttcctatattcatgaagcaatttttaaagaacactttaagaattgactctaataaaacattcgccatatctgcgttgaaaaactggaacatatccatgttttacaactactttaaaaactacacatatttgttgggcaaccctaatgttggtaaatctactttgatcaatactttattgcagaaatatcttggatataaggttaaaattgattctactgggaaaattaactccccctctgaagaagtgatgcaagaagcttttacgaacccgaagaattttttcaagattcaagctgctggtgtatctcatattcccaatttaactagatccgtacaagcctaccaagttggaggtaaaatactttttgatcttccaggctattctacttccacctccagattacgcttagaagaattgatcgacgagcgttggcttcaaaggcttagaaaaaccgatttattcaatagaaagcatataaaacagaagacttatgagtctatgaagggcacatctcagggaggctgttataccgtgggagggattttctacttggtacctccgaaaggatccataaatcagattgtgaaatacataccaggaccatctaaaacattcaagaacattgaaaaaggtattgatgtattcaactcttgcaattcttcttctggcacacatccgttatccagatattgtggaattaaaagcgttatatgcgaaaaaagccagtacaaaaggtacgcaatacctccatttattggaagtatagagatcgttttgaaagatataggatatattttattaaggacaactgggaggtatgagttcaaaggattgcatgagatatggatacctaggggtatccaagtaggtataagggaaccgttggaaaacttgattgagtctggctaccagcgttacattgaaacaaatggtaaagagagcagctgtcccagagatagaccgatcatcagttccttatatgagatggccccggatgaagctgatactttgaacgcagtgaagaagagttatttagaaaaaaccgagaaagatttatctgctagaagatttgtcgacgatgatccttatgatttggttcaacacttggaaaaaaaaaagaatccctattggtactaccaatggtga

SEQ ID NO: 10525 - DNA, 2133 bp, Saccharomyces cerevisiae
atgggtaaagtttctaaatcgaccaagaagtttcaatcgaagcatttgaagcatactctagaccaaagaagaaaggaaaagatccaaaagaagagaatccaaggccgtcgtggcaacaaaactgatcaggaaaaggccgatgctgctggtactagggaacaacagcagttgaaaaaatctgcaaaggaagaggtttttaaggacatgtctgtcgaaactttttttgaaaagggcatcgaaattccaaaagagaataaaaaattgaagaaaaaaactacgaaagagcaatctgatgaagattcctcctcttccgaagaggaggaagacatgggacaaagcatggcaaagttggccgaaaaggatcccgaattttataagtatttggaggaaaatgataaagatttattggacttcgcaggtaccaatccattggatggaattgatagtcaagatgaaggtgaagatgctgaaagaaacagtaatattgaagaaaaatctgaacaaatggagctggaaaaggaaaaaattgagctttctttgaaattggttaggaaatggaaaaaacaacttcatgattctccaagcttaaaattactaaggaacataatcagtgctttcaaggttgctgtaaatttgaacaaggaagaaaacatcgaagactataaatatgctatcactgatgagaaagcattccacgaattgatgttcatggtcttgaaagatgtaccacaagcgattcaaaagatggccccatacaagattgtaaaaggcgcaaggaccttaccaaatggaggtaacgtctccagggtctcgtccattgtcaagtcgcatgctggctctttgttgattttattgaatgatattactaatacggaaacagcagcattagttcttcattctgtcaacgaattgatgccttatcttttatcatacagaaggatcttaaaggagcttattaaatcaattgttggagtatggtctacaacgagagaattagaaacccagattgcttcttttgcctttttgatcaataccaccaaagagttcaagaagtctatgctagaaacaaccttaaaaacaacgtactccacttttatcaaaagttgtcgtaaaacgaatatgcgttctatgccactgattaattttcaaaaaaattcggcagctgaattgttcggtatcgatgaagttctaggttaccaagttggatttgagtatattaggcaattggcaattcatttaagaaatacaatgaacgcgacaactaaaaaatccagtaaaattaattccgcagaagcttacaagattgtatacaactggcaattctgtcactccttggatttctggtctcgtgtactatcgtttgcttgtcaaccagaaaaggaaaatggcagtgaatctcctttacgacaattaatttacccattggttcaggttactttgggtgtaatcagattaatcccaacaccacaattcttcccattaagattttatttgattaaatcacttattagactttctcaaaatagtggtgtttttattccaatatatcctttactttctgaaattttaacctcaacggctttcactaaggcacccaaaaagagccctaacttggctgctttcgattttgagcacaacatcaaatgtacgcaagcttatctgaatacaaaaatataccaagagggtttgtcagaacagtttgtggacttattgggcgattattttgctctgtactgtaaaaacattgcatttcctgaacttgtaacaccggttattatctctttacgccgttacatcaagacttcaactaatgtcaaacttaacaaacgtttatcaactgttgtagaaaaattgaaccaaaacagcacattcatccaagaaaagagatcagatgttgaatttgggccaacaaacaaatctgaagtttcaagatttttgaatgatgtagcttggaataaaacacctttaggttcttatgttgcagtacaacgtgaagttaaggaagaaaaggccagattaatgagagaaagtatggaagaacaagacaaagaaagagaaacagaagaagcaaaattattaaacagtctggaaagtgatgatgacaacgaagatgttgaaatgtcagacgcttaa

SEQ ID NO: 10526 - DNA, 2133 bp, Artificial Sequence
  Description of Artificial Sequence: Synthetic polynucleotide
atgggtaaagtttctaaatctaccaagaagtttcaatccaagcatttgaagcatactttggaccaaagaagaaaggaaaagatccaaaagaagagaatccaaggccgtcgtggcaacaaaactgatcaggaaaaggccgatgctgctggtactagggaacaacagcagttgaaaaaatctgcaaaggaagaggtttttaaggacatgtctgtcgaaactttttttgaaaagggcatcgaaattccaaaagagaataaaaaattgaagaaaaaaactacgaaagagcaatctgatgaagattcctcctcttccgaagaggaggaagacatgggacaaagcatggcaaagttggccgaaaaggatcccgaattttataagtatttggaggaaaatgataaagatttattggacttcgcaggtaccaatccattggatggaattgatagtcaagatgaaggtgaagatgctgaaagaaacagtaatattgaagaaaaatctgaacaaatggagttagaaaaggaaaaaattgagctttctttgaaattggttaggaaatggaaaaaacaacttcatgattctccaagcttaaaattattgaggaacataatcagtgctttcaaggttgctgtaaatttgaacaaggaagaaaacatcgaagactataaatatgctatcactgatgagaaagcattccacgaattgatgttcatggtcttgaaagatgtaccacaagcgattcaaaagatggccccatacaagattgtaaaaggcgcaaggaccttaccaaatggaggtaacgtctccagggtctcttccattgtcaagagtcatgctggctctttgttgattttattgaatgatattactaatacggaaacagcagcattagttcttcattctgtcaacgaattgatgccttatcttttatcttacagaaggatcttaaaggagcttattaaatccattgttggagtatggtctacaacgagagaattagaaacccagattgcttcttttgcctttttgatcaataccaccaaagagttcaagaagtctatgttggaaacaaccttaaaaacaacgtactccacttttatcaaaagttgtcgtaaaacgaatatgcgttctatgccattgattaattttcaaaaaaattctgcagctgaattgttcggtatcgatgaagttttaggttaccaagttggatttgagtatattaggcaattggcaattcatttaagaaatacaatgaacgcgacaactaaaaaatccagtaaaattaattccgcagaagcttacaagattgtatacaactggcaattctgtcactccttggatttctggtctcgtgtattatcttttgcttgtcaaccagaaaaggaaaatggcagtgaatctcctttaagacaattaatttacccattggttcaggttactttgggtgtaatcagattaatcccaacaccacaattcttcccattaagattttatttgattaaatctcttattagactttctcaaaatagtggtgtttttattccaatatatcctttactttctgaaattttaacctctacggctttcactaaggcacccaaaaagagccctaacttggctgctttcgattttgagcacaacatcaaatgtacgcaagcttatttgaatacaaaaatataccaagagggtttgagtgaacagtttgtggacttattgggcgattattttgctttgtactgtaaaaacattgcatttcctgaacttgtaacaccggttattatctctttacgccgttacatcaagacttctactaatgtcaaacttaacaaacgtttatctactgttgtagaaaaattgaaccaaaacagcacattcatccaagaaaagagaagtgatgttgaatttgggccaacaaacaaatctgaagtttctagatttttgaatgatgtagcttggaataaaacacctttaggttcttatgttgcagtacaacgtgaagttaaggaagaaaaggccagattaatgagagaaagtatggaagaacaagacaaagaaagagaaacagaagaagcaaaattattaaacagtttagaaagtgatgatgacaacgaagatgttgaaatgtctgacgcttga

SEQ ID NO: 10527 - DNA, 3450 bp, Saccharomyces cerevisiae
atggttgctgcgacaaaaagacggaaaactcatatacataagcatgtgaaagacgaggcttttgatgatttattgaaaccagtatataaaggtaagaaactaactgatgaaatcaatactgctcaggataagtggcaccttttaccagcattcttgaaggttaaaggtttggtgaagcaacatcttgactcatttaactacttcgttgatacagatttaaaaaaaattataaaggcaaatcaattaattttgagtgatgttgatccagaattctacctgaagtacgtcgatattagagtgggtaagaagtcctcttcttcgacaaaagattatttgactccgcctcatgagtgtaggcttagagatatgacatactctgcaccaatctacgtggatatagaatacactagaggtagaaacattattatgcataaagacgtggaaattggtaggatgccgatcatgctgagatctaataaatgtatcctatatgatgctgatgaatcgaaaatggctaaattaaacgagtgtccgttggatcctggtggttactttattgttaacggtaccgaaaaagtaattcttgttcaagaacaattatccaagaatcgtattattgtggaggcagatgagaagaaaggcattgttcaggcctccgttacttcatctacccatgaaagaaaatctaagacttatgtcattaccaaaaatggcaagatctatttgaagcacaattccatcgctgaagaaattcctattgctattgttctcaaagcctgtggtattttatcagatttagaaattatgcaattggtttgcggtaatgatagtagctaccaagatatttttgcagtcaatttggaagaatcttcgaaattagatatttacacacaacagcaagctttagagtatattggtgcaaaagtaaagacaatgagaaggcaaaaactgactatcctgcaagagggtatagaggccattgctaccacggttattgcacatttgactgtggaagcccttgactttagagaaaaggctttatatattgccatgatgacgcgcagggtggtgatggcaatgtataaccctaagatgattgatgatagagattatgttggtaataaacgtcttgaattagcaggccaattgatttctttattgttcgaagatttgttcaaaaagtttaataatgattttaaactaagcattgataaggtcttgaaaaaaccaaatagggctatggaatacgatgcattattgtcaattaacgtccattcaaataacatcaccagcggactgaacagagctatctcaaccggtaattggtctcttaaaagatttaagatggaaagagcgggtgttacacatgttctttccagactatcttatatttccgcattgggtatgatgacaagaatttcttctcagtttgaaaaatcaagaaaagtttccggtccaagagcattacaaccttctcaatttggtatgctttgtactgcagatactccagaaggtgaggcgtgtggtctagtgaaaaatttagcattaatgactcatattactacagatgacgaagaggaacctataaagaaattatgttatgttcttggtgtagaagacataacattgattgacagtgcatccttgcatttaaactatggtgtttatttgaatggtactttaattggttcaatcagattcccaacaaaattcgttactcagttcagacatctgagaagaacaggtaaagtgtcggagtttatctcaatttattcaaattctcaccaaatggcagttcatattgcaacagatggtggtagaatttgtaggccattaatcattgtttctgatggtcaatctcgcgtgaaagatattcatttacgcaaattattagatggtgagttagatttcgatgattttttgaaactcggattggtggaatatttagatgtcaatgaagaaaacgattcttacattgcattgtatgaaaaagatatagttccctcgatgacacatttagaaatcgagccattcacaattttaggtgctgttgctggtttaattccatatccacatcataaccaatcccctcgtaacacatatcaatgtgcgatgggtaagcaagcgattggtgcaatcgcctacaatcaattcaagagaatagatacattattatacttgatgacttatccacaacagccaatggtgaaaaccaaaacaattgaattgatcgattatgataaattacctgctggtcaaaatgctacggttgctgtcatgtcctattctggttatgatattgaagatgctttggttttgaataagtcatccatcgatagaggtttcggccgttgcgaaacacgtagaaagacaaccactgttttgaaaagatatgcgaaccatacccaagatatcatcggtggtatgagagttgatgaaaatggagatcctatctggcaacatcaatctcttggtcctgatggtctaggtgaggtgggtatgaaggtccaaagtggacaaatttatataaataagtcagttccaactaactcagcagacgccccaaacccaaacaacgtaaacgtccaaactcaatatagggaagctccggtaatatatagaggtccagaaccttctcacattgaccaagttatgatgtctgtttcggataacgatcaagctttaatcaaagttttgctaagacaaaacagaaggccagaattaggtgacaaattttcttctagacatggtcaaaaaggtgtttgtggtattattgtaaagcaagaagacatgcccttcaacgatcaaggtatagttccagacattatcatgaaccctcacggttttccatctcgtatgactgtgggtaaaatgatcgaactgatatcgggtaaagctggtgtattgaatggtacattggaatatggtacttgttttggtggttctaaacttgaagatatgtctaagattttggtagaccaaggtttcaactattccggtaaggatatgttatattcaggtataacaggtgagtgtttacaggcttacatcttttttggccccatttactatcaaaagttaaagcatatggtcttagataagatgcatgcaagagctcgtggtccaagggctgttttgacacgtcaaccaactgagggtagatctagagatggtggtctgaggttgggtgagatggagagggattgtgtaatcgcgtatggtgcttcacaattgctgttagaaaggttgatgattagttcagatgcttttgaagttgatgtctgcgataaatgtggattaatgggctatagtggttggtgtactacctgcaaaagtgctgagaatattattaagatgactattccatatgcagcaaaactgttattccaggaattattatccatgaacatagccccaagattaagattggaagatatcttccagcagtaa

SEQ ID NO: 10528 - DNA, 3450 bp, Artificial Sequence
  Description of Artificial Sequence: Synthetic polynucleotide
atggttgctgcgacaaaaagaagaaaaactcatatacataagcatgtgaaagacgaggcttttgatgatttattgaaaccagtatataaaggtaagaaattaactgatgaaatcaatactgctcaggataagtggcaccttttaccagcattcttgaaggttaaaggtttggtgaagcaacatcttgactcttttaactacttcgttgatacagatttaaaaaaaattataaaggcaaatcaattaattttgagtgatgttgatccagaattctacttgaagtacgtcgatattagagtgggtaagaagtcctcttcttctacaaaagattatttgactccgcctcatgagtgtaggcttagagatatgacatactctgcaccaatctacgtggatatagaatacactagaggtagaaacattattatgcataaagacgtggaaattggtaggatgccgatcatgttgagatctaataaatgtatcttatatgatgctgatgaaagtaaaatggctaaattaaacgagtgtccgttggatcctggtggttactttattgttaacggtaccgaaaaagtaattcttgttcaagaacaattatccaagaatcgtattattgtggaggcagatgagaagaaaggcattgttcaggcctccgttacttcttctacccatgaaagaaaatctaagacttatgtcattaccaaaaatggcaagatctatttgaagcacaattccatcgctgaagaaattcctattgctattgttctcaaagcctgtggtattttaagtgatttagaaattatgcaattggtttgcggtaatgatagtagctaccaagatatttttgcagtcaatttggaagaatcttctaaattagatatttacacacaacagcaagctttagagtatattggtgcaaaagtaaagacaatgagaaggcaaaaattaactatcttgcaagagggtatagaggccattgctaccacggttattgcacatttgactgtggaagcccttgactttagagaaaaggctttatatattgccatgatgacgcgcagggtggtgatggcaatgtataaccctaagatgattgatgatagagattatgttggtaataaacgtcttgaattagcaggccaattgatttctttattgttcgaagatttgttcaaaaagtttaataatgattttaaattaagcattgataaggtcttgaaaaaaccaaatagggctatggaatacgatgcattattgtctattaacgtccattctaataacatcaccagcggattgaacagagctatctccaccggtaattggtctcttaaaagatttaagatggaaagagcgggtgttacacatgttctttccagattatcttatatttccgcattgggtatgatgacaagaatttcttctcagtttgaaaaatctagaaaagtttccggtccaagagcattacaaccttctcaatttggtatgctttgtactgcagatactccagaaggtgaggcgtgtggtttagtgaaaaatttagcattaatgactcatattactacagatgacgaagaggaacctataaagaaattatgttatgttcttggtgtagaagacataacattgattgacagtgcatccttgcatttaaactatggtgtttatttgaatggtactttaattggttctatcagattcccaacaaaattcgttactcagttcagacatttaagaagaacaggtaaagtgtctgagtttatctctatttattctaattctcaccaaatggcagttcatattgcaacagatggtggtagaatttgtaggccattaatcattgtttctgatggtcaatctcgcgtgaaagatattcatttacgcaaattattagatggtgagttagatttcgatgattttttgaaactcggattggtggaatatttagatgtcaatgaagaaaacgattcttacattgcattgtatgaaaaagatatagttccctctatgacacatttagaaatcgagccattcacaattttaggtgctgttgctggtttaattccatatccacatcataaccaatcccctcgtaacacatatcaatgtgcgatgggtaagcaagcgattggtgcaatcgcctacaatcaattcaagagaatagatacattattatacttgatgacttatccacaacagccaatggtgaaaaccaaaacaattgaattgatcgattatgataaattacctgctggtcaaaatgctacggttgctgtcatgtcctattctggttatgatattgaagatgctttggttttgaataagtcttccatcgatagaggtttcggccgttgcgaaacacgtagaaagacaaccactgttttgaaaagatatgcgaaccatacccaagatatcatcggtggtatgagagttgatgaaaatggagatcctatctggcaacatcaatctcttggtcctgatggtttaggtgaggtgggtatgaaggtccaaagtggacaaatttatataaataagtctgttccaactaactctgcagacgccccaaacccaaacaacgtaaacgtccaaactcaatatagggaagctccggtaatatatagaggtccagaaccttctcacattgaccaagttatgatgtctgtttctgataacgatcaagctttaatcaaagttttgttaagacaaaacagaaggccagaattaggtgacaaattttcttctagacatggtcaaaaaggtgtttgtggtattattgtaaagcaagaagacatgcccttcaacgatcaaggtatagttccagacattatcatgaaccctcacggttttccatctcgtatgactgtgggtaaaatgatcgaattgatatctggtaaagctggtgtattgaatggtacattggaatatggtacttgttttggtggttctaaacttgaagatatgtctaagattttggtagaccaaggtttcaactattccggtaaggatatgttatattctggtataacaggtgagtgtttacaggcttacatcttttttggccccatttactatcaaaagttaaagcatatggtcttagataagatgcatgcaagagctcgtggtccaagggctgttttgacacgtcaaccaactgagggtagatctagagatggtggtttgaggttgggtgagatggagagggattgtgtaatcgcgtatggtgcttctcaattgttattagaaaggttgatgattagttctgatgcttttgaagttgatgtctgcgataaatgtggattaatgggctatagtggttggtgtactacctgcaaaagtgctgagaatattattaagatgactattccatatgcagcaaaattattattccaggaattattatccatgaacatagccccaagattaagattggaagatatcttccagcagtga

SEQ ID NO: 10529 - DNA, 2253 bp, Saccharomyces cerevisiae
atggatcgcatagcacagcaatatcgtaatggcaaaagagacaataacggcaatagaatggcttcttccgctatatcggaaaagggccacatacaagtcaatcaaactagaacacctggtcaaatgcccgtctatagaggtgaaactataaatctgtctaaccttccccaaaatcaaattaaaccgtgcaaagatttggacgacgttaacatacggcggaacaactctaataggcattctaaaatacttttactagatctgtgcgctggccccaataccaactcatttttaggcaataccaatgctaaggatatcacagttttatcgttgccgctacccagcactttggtgaaaaggtcgaactacccgttcgagaacttactaaagaattaccttggatctgatgaaaagtatattgagttcacaaagatcatcaaagattatgatattttcattttcagtgattcgtttagcagaatttcgagttgtttaaagacaactttttgcctcattgagaagtttaaaaagttcatctgccatttttttccatctccttatttgaaattctttcttctcgaaggctctctgaatgatagcaaggccccctcattaggaaaaaataagaaaaattgcatcttgcccaaattggatttgaacttgaatgtaaacttaacttcaaggtcaactttaaatttaagaataaacatacctccacccaatgattcaaataaaatatttttacagtctctgaaaaaggatctaattcattattctcctaattctttgcaaaagtttttccaattcaatatgcctgctgacttagcacctaacgacacgattttaccgaattggctaaaattctgctccgtaaaagaaaatgaaaaggtaatattaaagaaactctttaacaattttgaaactttagaaaattttgaaatgcaaagattagagaaatgcctgaaattcaagaaaaagcctttacatcaaaagcagctatcacaaaagcagaggggtccgcaatccacggatgattcaaaattatattctttaactagtttgcaacgacagtataaaagttctttgaaaagcaacatacagaaaaatcaaaagctaaaattaattataccaaaaaacaacacatcttcttcgccatcaccattatcttccgatgatactataatgtcaccaataaatgattacgaacttactgaaggaattcagtcttttactaagaatagatattctaatatcttaccttacgaacattcaagagtaaagttacctcactccccgaaaccacctgcagtttctgaagcatccacaaccgaaactaaaacagataagtcatatccgatgtgtcccgtagatgcaaaaaaccactcctgcaaaccgaacgactatatcaatgcgaactatttgaagctcacgcaaattaatcctgatttcaagtatattgctacccaagctccgcttccttctacgatggatgatttttggaaggttattactttaaataaagttaaagtaataatatcattgaattctgacgatgaattgaatttaagaaaatgggatatttactggaataatctgtcatattccaaccacactatcaaacttcagaacacctgggagaatatttgcaatattaatggctgtgttctcagagtctttcaagtcaagaaaacagctccacaaaatgataatatcagtcaagattgtgaccttccgcataatggtgaccttacttccattaccatggctgtatccgagccgtttattgtttaccaattacaatacaagaattggttagattcatgcggcgtagatatgaatgacatcattaaactacacaaagtcaaaaattcgttattgtttaacccgcaaagttttattacaagcctcgaaaaggatgtttgcaagcctgatttgatagatgataataatagtgagttacatctcgatacagcaaattcatcgccactattagtccattgttctgcagggtgtggaagaacaggtgttttcgttaccttggatttcctactaagtattctttcacctacaacaaatcactcaaacaagattgatgtttggaatatgactcaggaccttatctttatcatagtgaatgaattaagaaagcaaaggatttcaatggtacagaatctaactcaatatatcgcttgttatgaggcattattaaattattttgccctgcaaaagcagataaagaacgcgttaccttgttaa

SEQ ID NO: 10530 - DNA, 2253 bp, Artificial Sequence
  Description of Artificial Sequence: Synthetic polynucleotide
atggatcgcatagcacagcaatatcgtaatggcaaaagagacaataacggcaatagaatggcttcttccgctatatctgaaaagggccacatacaagtcaatcaaactagaacacctggtcaaatgcccgtctatagaggtgaaactataaatttatctaaccttccccaaaatcaaattaaaccgtgcaaagatttggacgacgttaacataagaagaaacaactctaataggcattctaaaatacttttattagatttatgcgctggccccaataccaactcttttttaggcaataccaatgctaaggatatcacagttttatctttgccgttgcccagcactttggtgaaaaggtctaactacccgttcgagaacttattgaagaattaccttggatctgatgaaaagtatattgagttcacaaagatcatcaaagattatgatattttcattttcagtgattcttttagcagaatttccagttgtttaaagacaactttttgcctcattgagaagtttaaaaagttcatctgccatttttttccatctccttatttgaaattctttcttctcgaaggctctttgaatgatagcaaggccccctctttaggaaaaaataagaaaaattgcatcttgcccaaattggatttgaacttgaatgtaaacttaacttctaggtctactttaaatttaagaataaacatacctccacccaatgattctaataaaatatttttacagtctttgaaaaaggatttgattcattattctcctaattctttgcaaaagtttttccaattcaatatgcctgctgacttagcacctaacgacacgattttaccgaattggttgaaattctgctccgtaaaagaaaatgaaaaggtaatattaaagaaactctttaacaattttgaaactttagaaaattttgaaatgcaaagattagagaaatgcttgaaattcaagaaaaagcctttacatcaaaagcagttatctcaaaagcagaggggtccgcaatccacggatgattctaaattatattctttaactagtttgcaaagacagtataaaagttctttgaaaagcaacatacagaaaaatcaaaagttgaaattaattataccaaaaaacaacacatcttcttctccatctccattatcttccgatgatactataatgtctccaataaatgattacgaacttactgaaggaattcagtcttttactaagaatagatattctaatatcttaccttacgaacattccagagtaaagttacctcactccccgaaaccacctgcagtttctgaagcatccacaaccgaaactaaaacagataagagttatccgatgtgtcccgtagatgcaaaaaaccactcctgcaaaccgaacgactatatcaatgcgaactatttgaagctcacgcaaattaatcctgatttcaagtatattgctacccaagctccgcttccttctacgatggatgatttttggaaggttattactttaaataaagttaaagtaataatatctttgaattctgacgatgaattgaatttaagaaaatgggatatttactggaataatttatcttattccaaccacactatcaaacttcagaacacctgggagaatatttgcaatattaatggctgtgttctcagagtctttcaagtcaagaaaacagctccacaaaatgataatatcagtcaagattgtgaccttccgcataatggtgaccttacttccattaccatggctgtatccgagccgtttattgtttaccaattacaatacaagaattggttagattcctgcggcgtagatatgaatgacatcattaaattacacaaagtcaaaaattctttattgtttaacccgcaaagttttattacaagcctcgaaaaggatgtttgcaagcctgatttgatagatgataataatagtgagttacatctcgatacagcaaattcttctccattattagtccattgttctgcagggtgtggaagaacaggtgttttcgttaccttggatttcttattaagtattctttctcctacaacaaatcactccaacaagattgatgtttggaatatgactcaggaccttatctttatcatagtgaatgaattaagaaagcaaaggatttccatggtacagaatttaactcaatatatcgcttgttatgaggcattattaaattattttgccttgcaaaagcagataaagaacgcgttaccttgttga

SEQ ID NO: 10531 - DNA, 1290 bp, Saccharomyces cerevisiae
atgtcagaaccagtgataaagtctcttttggacacagacatgtacaagattacgatgcatgctgctgtcttcactaattttccagatgttacagttacttataaatataccaacaggtcgtcccaattgaccttcaataaggaagccattaattggttgaaagagcaattttcgtatttgggaaatttgaggttcacagaagaggaaattgaatacttaaaacaggaaatcccatatttgccatcggcatatattaagtatattagcagttctaattacaaactacaccctgaagagcagatttccttcacttcagaagaaatcgagggcaagcccacccactacaaattgaaaattttagtcagtggtagttggaaggatactatcctttatgagatccccttactgtccctaatatcagaagcgtattttaaatttgttgacatcgactgggactacgaaaaccaattagaacaagctgagaagaaggcggaaactttgtttgataatggtattagattcagtgaatttggtacaagacgtcgtagatctctgaaggctcaagatctaattatgcaaggaatcatgaaagctgtgaacggtaacccagacagaaacaaatcgctattattaggcacatcaaatattttatttgccaagaaatatggagtcaagccaatcggtactgtggctcacgagtgggttatgggagtcgcttctattagtgaagattatttgcatgccaataaaaatgcaatggattgttggatcaatacttttggtgcaaaaaatgctggtttagcattaacggatacttttggaactgatgactttttaaaatcattccgtccaccatattctgatgcttacgtcggtgttagacaagattctggagacccagttgagtataccaaaaagatttcccaccattaccatgacgtgttgaaattgcctaaattctcgaagattatctgttattccgattctttgaacgtcgaaaaggcaataacttactcccatgcagctaaagagaatggaatgctagccacattcggtattggcacaaactttactaatgattttcgtaagaagtcagaaccccaggttaaaagtgagccgttaaacatcgttatcaaactattagaagtaaatggtaatcacgctatcaaaatttctgataacttaggtaaaaatatgggagatcctgccactgtgaagagagtgaaagaggaattgggatatactgaacgaagttggagtggtgataacgaagcgcacagatggacctaa

SEQ ID NO: 10532 - DNA, 1290 bp, Artificial Sequence
  Description of Artificial Sequence: Synthetic polynucleotide
atgtctgaaccagtgataaagtctcttttggacacagacatgtacaagattacgatgcatgctgctgtcttcactaattttccagatgttacagttacttataaatataccaacaggtcttcccaattgaccttcaataaggaagccattaattggttgaaagagcaattttcttatttgggaaatttgaggttcacagaagaggaaattgaatacttaaaacaggaaatcccatatttgccatctgcatatattaagtatattagcagttctaattacaaattacaccctgaagagcagatttccttcacttctgaagaaatcgagggcaagcccacccactacaaattgaaaattttagtcagtggtagttggaaggatactatcctttatgagatccccttattatccttgatatctgaagcgtattttaaatttgttgacatcgactgggactacgaaaaccaattagaacaagctgagaagaaggcggaaactttgtttgataatggtattagattcagtgaatttggtacaagacgtcgtagatctttgaaggctcaagatttgattatgcaaggaatcatgaaagctgtgaacggtaacccagacagaaacaaatctttattattaggcacaagtaatattttatttgccaagaaatatggagtcaagccaatcggtactgtggctcacgagtgggttatgggagtcgcttctattagtgaagattatttgcatgccaataaaaatgcaatggattgttggatcaatacttttggtgcaaaaaatgctggtttagcattaacggatacttttggaactgatgactttttaaaatctttccgtccaccatattctgatgcttacgtcggtgttagacaagattctggagacccagttgagtataccaaaaagatttcccaccattaccatgacgtgttgaaattgcctaaattctccaagattatctgttattccgattctttgaacgtcgaaaaggcaataacttactcccatgcagctaaagagaatggaatgttggccacattcggtattggcacaaactttactaatgattttcgtaagaagtctgaaccccaggttaaaagtgagccgttaaacatcgttatcaaattattagaagtaaatggtaatcacgctatcaaaatttctgataacttaggtaaaaatatgggagatcctgccactgtgaagagagtgaaagaggaattgggatatactgaaagaagttggagtggtgataacgaagcgcacagatggacctga

SEQ ID NO: 10533 - DNA, 213 bp, Saccharomyces cerevisiae
atgattgtcccagtcagatgtttctcatgcggtaaagttgttggtgacaagtgggaaagctacttaaacttgttgcaagaagatgagttggatgaaggtactgcattgtcaagattaggtctaaaaagatactgctgtagaagaatgattctaacccacgtcgatcttattgaaaagtttttaagatacaacccattagaaaaaagagattaa

SEQ ID NO: 10534 - DNA, 213 bp, Artificial Sequence
  Description of Artificial Sequence: Synthetic polynucleotide
atgattgtcccagtcagatgtttcagttgcggtaaagttgttggtgacaagtgggaaagctacttaaacttgttgcaagaagatgagttggatgaaggtactgcattgtccagattaggtttgaaaagatactgctgtagaagaatgattttgacccacgtcgatcttattgaaaagtttttaagatacaacccattagaaaaaagagattga

SEQ ID NO: 10535 - DNA, 2646 bp, Saccharomyces cerevisiae
atgaatgcgagcccagtacggcttttaattctgagaagacagcttgctacgcatccggcgatactatatagctctccttacatcaaaagtccgttggtgcacttacacagccgcatgagcaatgttcacagatcagcacatgccaatgctttgagttttgttatcaccaggagatcgatatcacattttcctaaaattatatctaaaattattaggttacccatatatgtgggtggcgggatggctgctgcagggagttatatagcttataagatggaagaagctagctcttttactaaggacaaactagatcgaatcaaggatttaggtgaatcgatgaaggaaaagtttaataaaatgttttccggtgataagtcacaagacggtggtcatggaaacgatggaacggtgccaactgctactctaatagccgctacatcactcgacgatgacgaaagtaagaggcaaggagatcctaaagatgatgacgacgaagatgatgatgacgaggatgatgaaaacgattctgtagatacaacgcaagacgaaatgttaaacttaaccaaacaaatgattgaaattagaactattttgaataaagtggactcttcttctgcacatttaactttaccatctattgtcgtgataggttcacaatcgtctggtaaatcctcagtactagaatccattgttgggagggaattcttaccaaaaggttccaacatggtcacaagaagacccattgaattgactttggtcaatacacctaactcgaataatgtaacagctgattttccaagcatgcgtctatacaatatcaaggactttaaagaggtgaaaagaatgctaatggaactgaacatggccgttccgacttcagaggctgtttcagaggagcctattcaattgacaatcaaatcgtcccgcgttccagatttatcattggtggatctacctggctatatacaagtggaagcggcagaccagccaatagaactgaaaacaaaaatccgtgacctctgcgaaaaatatttgactgcacctaatattattttagcaatttctgctgcggatgttgacctggctaatagttctgctttgaaagcttctaaagcggcagatcctaaaggcttgagaacgataggtgtcattaccaaactggatttggtggatcctgaaaaagcaagaagcatcttgaataataaaaaatatcctctcagtatgggctatgtaggagtgattactaagacaccaagtagtataaacagaaaacacctaggtcttttcggtgaagcaccttcttcgtcattaagtgggatattttcaaaaggccagcacggccaaagtagcggagaagaaaataccaatggtttaaaacaaattgtgtctcatcaatttgaaaaagcttatttcaaagaaaacaaaaagtattttaccaattgccaagtttccactaagaaattgagagaaaagttgatcaaaatcttggagatttccatgtcaaatgcgctggagccgacttcaacacttattcaacaagagttggatgatacttcttatttgtttaaagtagagtttaacgacaggcatctaactcctaaatcataccttttgaataatatagatgtactaaagttgggtattaaagagtttcaggaaaaatttcatagaaatgaactgaaatcaatcttgagagcagaattggatcagaaagttttagatgttttggctacacggtattggaaggatgataatcttcaggatctatcttcctctaagctggaaagtgataccgatatgctatattggcataaaaaattggaactcgcatcatccggcttaactaaaatgggcattggtagattatctacaatgcttactaccaatgcaattttaaaggagctagataacattctggagtctactcaactaaaaaaccatgaactgatcaaagaccttgttagcaatacagccattaacgttctaaacagtaaatactattcaacggctgatcaagttgagaactgtatcaaacccttcaagtatgaaattgatttggaagaaagagactggagccttgctcgtcaacattccattaatttaataaaggaagaattacgtcaatgtaactcaaggtaccaggcaatcaaaaatgccgttggcagtaagaaattagcaaatgtaatgggctatttagaaaatgaatcaaatttgcaaaaagaaacactcggcatgtccaaattactattggaaagaggctctgaagctattttcctggataaaaggtgcaaagtgttatcgttcagattaaaaatgttgaaaaacaaatgtcattcgacaattgagaaggatcgttgtccagaggtatttctatctgcagttagtgataaattgacctccacagctgttttattccttaacgttgaattattaagcgattttttttataacttccctattgaattagacagaaggttaacattgttgggagatgaacaagtggaaatgtttgctaaggaagatccgaagatttcaaggcatattgaattgcaaaagagaaaggagctgttagaattagccttggagaaaatagattcaatcttggttttcaagaaaagctacaagggcgtctccaaaaatttatga

SEQ ID NO: 10536 - DNA, 2646 bp, Artificial Sequence
  Description of Artificial Sequence: Synthetic polynucleotide
atgaatgcgagcccagtacgtcttttaattttaagaagacagcttgctacgcatccggcgatactttatagctctccttacatcaaaagtccgttggtgcacttacacagccgcatgagcaatgttcacagaagtgcacatgccaatgctttgagttttgttatcaccaggagaagtatatctcattttcctaaaattatatctaaaattattaggttacccatatatgtgggtggcgggatggctgctgcagggagttatatagcttataagatggaagaagctagctcttttactaaggacaaattggatagaatcaaggatttaggtgaaagtatgaaggaaaagtttaataaaatgttttccggtgataagtctcaagacggtggtcatggaaacgatggaacggtgccaactgctactttgatagccgctacatctctcgacgatgacgaaagtaagaggcaaggagatcctaaagatgatgacgacgaagatgatgatgacgaggatgatgaaaacgattctgtagatacaacgcaagacgaaatgttaaacttaaccaaacaaatgattgaaattagaactattttgaataaagtggactcttcttctgcacatttaactttaccatctattgtcgtgataggttctcaatcttctggtaaatcctctgtattggaatccattgttgggagggaattcttaccaaaaggttccaacatggtcacaagaagacccattgaattgactttggtcaatacacctaacagtaataatgtaacagctgattttccaagcatgcgtctttacaatatcaaggactttaaagaggtgaaaagaatgttaatggaattgaacatggccgttccgacttccgaggctgtttctgaggagcctattcaattgacaatcaaatcttcccgcgttccagatttatctttggtggatttacctggctatatacaagtggaagcggcagaccagccaatagaattgaaaacaaaaatccgtgacctctgcgaaaaatatttgactgcacctaatattattttagcaatttctgctgcggatgttgacttggctaatagttctgctttgaaagcttctaaagcggcagatcctaaaggcttgagaacgataggtgtcattaccaaattggatttggtggatcctgaaaaagcaagaagcatcttgaataataaaaaatatcctctcagtatgggctatgtaggagtgattactaagacaccaagtagtataaacagaaaacacttgggtcttttcggtgaagcaccttcttcttctttaagtgggatattttccaaaggccagcacggccaaagtagcggagaagaaaataccaatggtttaaaacaaattgtgtctcatcaatttgaaaaagcttatttcaaagaaaacaaaaagtattttaccaattgccaagtttccactaagaaattgagagaaaagttgatcaaaatcttggagatttccatgagtaatgcgctcgagccgacttctacacttattcaacaagagttggatgatacttcttatttgtttaaagtagagtttaacgacaggcatttgactcctaaatcttaccttttgaataatatagatgtattgaagttgggtattaaagagtttcaggaaaaatttcatagaaatgaattgaaatctatcttgagagcagaattggatcagaaagttttagatgttttggctacaagatattggaaggatgataatcttcaggatttatcttcctctaagttggaaagtgataccgatatgctttattggcataaaaaattggaactcgcatcttccggcttaactaaaatgggcattggtagattatctacaatgcttactaccaatgcaattttaaaggagttagataacattttagagtctactcaattgaaaaaccatgaattgatcaaagaccttgttagcaatacagccattaacgttttgaacagtaaatactattctacggctgatcaagttgagaactgtatcaaacccttcaagtatgaaattgatttggaagaaagagactggagccttgctcgtcaacattccattaatttaataaaggaagaattacgtcaatgtaacagcaggtaccaggcaatcaaaaatgccgttggcagtaagaaattagcaaatgtaatgggctatttagaaaatgaaagtaatttgcaaaaagaaacactcggcatgtccaaattattattggaaagaggctctgaagctattttcttggataaaaggtgcaaagtgttatctttcagattaaaaatgttgaaaaacaaatgtcattctacaattgagaaggatcgttgtccagaggtatttttatctgcagttagtgataaattgacctccacagctgttttattccttaacgttgaattattaagcgattttttttataacttccctattgaattagacagaaggttaacattgttgggagatgaacaagtggaaatgtttgctaaggaagatccgaagatttctaggcatattgaattgcaaaagagaaaggagttattagaattagccttggagaaaatagattctatcttggttttcaagaaaagctacaagggcgtctccaaaaatttatga

SEQ ID NO: 10537 - DNA, 1272 bp, Saccharomyces cerevisiae
atggcagcacatcagatggactcgataacgtattctaataatgtcacccaacagtatatacaaccacaaagtctacaggatatctctgcagtggaggatgaaattcaaaataaaatagaggccgccagacaagagagtaaacagcttcatgctcaaataaataaagcaaaacacaagatacaagatgcaagcttattccagatggccaacaaagttacttcgttgaccaaaaataagatcaacttaaagccaaatatcgtgttgaaaggccataataataaaatctcagattttcggtggagtcgagattcaaaacgtattttgagtgcaagtcaagatggctttatgcttatatgggacagtgcttcaggtttaaaacagaacgctattccattagattctcaatgggttctttcctgcgctatttcgccatcgagtactttggtagcaagcgcaggattaaacaataactgtaccatttatagagtttcgaaagaaaacagagtagcgcaaaacgttgcgtcaattttcaaaggacatacttgctatatttctgacattgaatttacagataacgcacatatattgacagcaagtggggatatgacatgtgccttgtgggatataccgaaagcaaagagggtgagagaatattctgaccatttaggtgatgttttggcattagctattcctgaagagccaaactcagaaaattcttcgaacacattcgctagctgtggatcagacgggtatacttacatatgggatagcagatctccgtccgctgtacaaagcttttacgttaacgatagtgatattaatgcacttcgttttttcaaagacgggatgtcgattgttgcaggaagtgacaatggtgcgataaatatgtatgatttaaggtcggactgttctattgctactttttctctttttcgaggttatgaagaacgtacccctacccctacttatatggcagctaacatggagtacaataccgcgcaatcgccacaaactttaaaatcaacaagctcaagctatctagacaaccaaggcgttgtttctttagattttagtgcatctggaagattgatgtactcatgctatacagacattggttgtgttgtgtgggatgtattaaaaggagagattgttggaaaattagaaggtcatggtggcagagtcactggtgtgcgctcgagtccagatgggttagctgtatgtacaggttcatgggactcaaccatgaaaatatggtctccaggttatcaatag

SEQ ID NO: 10538 - DNA, 1272 bp, Artificial Sequence
  Description of Artificial Sequence: Synthetic polynucleotide
atggcagcacatcagatggacagtataacgtattctaataatgtcacccaacagtatatacaaccacaaagtttacaggatatctctgcagtggaggatgaaattcaaaataaaatagaggccgccagacaagagagtaaacagcttcatgctcaaataaataaagcaaaacacaagatacaagatgcaagcttattccagatggccaacaaagttacttctttgaccaaaaataagatcaacttaaagccaaatatcgtgttgaaaggccataataataaaatcagtgattttagatggagtagagattctaaacgtattttgagtgcaagtcaagatggctttatgcttatatgggacagtgcttctggtttaaaacagaacgctattccattagattctcaatgggttctttcctgcgctatttctccatctagtactttggtagcaagcgcaggattaaacaataactgtaccatttatagagtttccaaagaaaacagagtagcgcaaaacgttgcgtccattttcaaaggacatacttgctatatttctgacattgaatttacagataacgcacatatattgacagcaagtggggatatgacatgtgccttgtgggatataccgaaagcaaagagggtgagagaatattctgaccatttaggtgatgttttggcattagctattcctgaagagccaaactctgaaaattcttccaacacattcgctagctgtggatctgacgggtatacttacatatgggatagcagatctccgtccgctgtacaaagcttttacgttaacgatagtgatattaatgcacttcgttttttcaaagacgggatgtctattgttgcaggaagtgacaatggtgcgataaatatgtatgatttaaggagtgactgttctattgctactttttctctttttagaggttatgaagaacgtacccctacccctacttatatggcagctaacatggagtacaataccgcgcaatctccacaaactttaaaatctacaagcagcagctatttggacaaccaaggcgttgtttctttagattttagtgcatctggaagattgatgtactcttgctatacagacattggttgtgttgtgtgggatgtattaaaaggagagattgttggaaaattagaaggtcatggtggcagagtcactggtgtgcgcagtagtccagatgggttagctgtatgtacaggttcttgggactctaccatgaaaatatggtctccaggttatcaatga

SEQ ID NO: 10539 - DNA, 747 bp, Saccharomyces cerevisiae
atggatcattcaatagaagtcactttcagagtaaaaacacaacaggttataataccggaacaaaacatccggggaaatgaacttcccttacgtcggtggcagatggaactcctcatgttagatgcaacaggaaaggaagtggagcctaccatcctctctaaatgcatctaccatttgcactctagcttcaaacagcccaaaagacgactgaactcgctgccattttttatcaaggaaaccggttggggagagtttaacttaaaaatagaatgcttttttataggtaacgctggaaagtttagcattgaacatgacttaacgtttgaagatgatgcatatgcagttgactataccgttgatgtgcctcatgaattctcacatctcaatagtgaactatctaaatattttgatctcccgtggaaagtagtgtctccggaggaagaaatgtctcttcgtatagccgatttgccctggattaaaagccttgcgcttatagatgaggatatgatgacggacgtggttcagatgatattgaatgatcctgcagtacagagagcaattgaaaatcatcccagaagggagcagttttttatgtttataacacaactaccagatgatttgttaatgaaaattcaggcatttttgaaattaccgaacaaaaattccactaaacaagaaaggacaaattttgggtcagacgcaatacataaggacgagccagtgaaggctcataacaagctaaagtag

SEQ ID NO: 10540 - DNA, 747 bp, Artificial Sequence
  Description of Artificial Sequence: Synthetic polynucleotide
atggatcattccatagaagtcactttcagagtaaaaacacaacaggttataataccggaacaaaacatcagaggaaatgaacttcccttacgtcgttggcagatggaactcctcatgttagatgcaacaggaaaggaagtggagcctaccatcctctctaaatgcatctaccatttgcactctagcttcaaacagcccaaaagaagattgaactctttaccattttttatcaaggaaaccggttggggagagtttaacttaaaaatagaatgcttttttataggtaacgctggaaagtttagcattgaacatgacttaacgtttgaagatgatgcatatgcagttgactataccgttgatgtgcctcatgaattctctcatctcaatagtgaattatctaaatattttgatctcccgtggaaagtagtgtctccggaggaagaaatgtctcttcgtatagccgatttgccctggattaaaagccttgcgcttatagatgaggatatgatgacggacgtggttcagatgatattgaatgatcctgcagtacagagagcaattgaaaatcatcccagaagggagcagttttttatgtttataacacaattaccagatgatttgttaatgaaaattcaggcatttttgaaattaccgaacaaaaattccactaaacaagaaaggacaaattttgggagtgacgcaatacataaggacgagccagtgaaggctcataacaagttgaagtga

SEQ ID NO: 10541 - DNA, 711 bp, Saccharomyces cerevisiae
atgttaggattatatctatcctcccttttcttcgccttttttatggcacaagtgtttgctaccaaatactcaattacttttacatcagatgagtatgaagaagatgaaacaggacaaaatgaacctggtcctttagttttccatttggataaaaactcattaccaccagctctgctaaatcaaatggagtttaatccatacttagtattagcagatttaccggaggagccgcgagctgttgattctcaagaacataccgatacggtccttgcttccaaatctgttatagattttctgttggaagatcctctaacaatagtggagcacaaaaagttttctcaaattgaaagtattctacatgaaattatggaagacagcatacagaagaaagtcggggcagacgaggtatttgaagagattccgaaaccgaaaatttacgcgtatgaagatattttagtaactaatatgagcatcatcaataatagtgaaatgccgacaagtactgcaacattaacgagcaccatttcttatttatctagtacgacaagtttagctttatccacgggtgttaccagcgttgagattttcccaacaatcaccccgggaaatattacaactattgggggatacgaaaattcatcatcctccttaatgccgtcgatgggaatcttatcttttctatttggtctgtacttgttacttcacccttaa

SEQ ID NO: 10542 - DNA, 711 bp, Artificial Sequence
  Description of Artificial Sequence: Synthetic polynucleotide
atgttaggattatatttatcctcccttttcttcgccttttttatggcacaagtgtttgctaccaaatactctattacttttacatctgatgagtatgaagaagatgaaacaggacaaaatgaacctggtcctttagttttccatttggataaaaactctttaccaccagctttgttgaatcaaatggagtttaatccatacttagtattagcagatttaccggaggagccgagggctgttgattctcaagaacataccgatacggtccttgcttccaaatctgttatagattttttattggaagatcctttaacaatagtggagcacaaaaagttttctcaaattgaaagtattttgcatgaaattatggaagacagcatacagaagaaagtcggggcagacgaggtatttgaagagattccgaaaccgaaaatttacgcgtatgaagatattttagtaactaatatgagcatcatcaataatagtgaaatgccgacaagtactgcaacattaacgagcaccatttcttatttatctagtacgacaagtttagctttatccacgggtgttaccagcgttgagattttcccaacaatcaccccgggaaatattacaactattgggggatacgaaaattcttcttcctccttaatgccgtctatgggaatcttatcttttttgtttggtttatacttgttacttcacccttga

SEQ ID NO: 10543 - DNA, 558 bp, Saccharomyces cerevisiae
atgttcagacaatcaattaggccacttgtttcaaatagactaaccttcattcgttataacagttctccagcctacacggctgcagtcagcctattgaaaggagatttgaaaaaggctatgattgccaaggatgagatgaagaagacagcaatcagaaatatgttatctgccataaaaaacaaagaaattgctttaaaagggaagagcgctgatgagtactccctgtacgacatgtactccaagttaatatctcaaagaaaggactcgatcaatgagttccttgctaacaagagggacgatctggtggccaaagagcaaggtgaaatggacattataaagaaatatatggaccaattgccagtgtcttcagagcttgatattgatcaaaatgtgaagaaattactggacgccctcaaaacaaaggcaggtgaaaaaaaagttcaaattaaggaaatcatgggagaaatcgactggaagtcattgccaacagaatggaagacatctccaactgccatcaaaaatagcattgttaagcaattcaaggaaattttcaaatga

SEQ ID NO: 10544 - DNA, 558 bp, Artificial Sequence
  Description of Artificial Sequence: Synthetic polynucleotide
atgttcagacaatctattaggccacttgtttctaatagattgaccttcattcgttataacagttctccagcctacacggctgcagtcagccttttgaaaggagatttgaaaaaggctatgattgccaaggatgagatgaagaagacagcaatcagaaatatgttatctgccataaaaaacaaagaaattgctttaaaagggaagagcgctgatgagtactccttgtacgacatgtactccaagttaatatctcaaagaaaggactctatcaatgagttccttgctaacaagagggacgatttggtggccaaagagcaaggtgaaatggacattataaagaaatatatggaccaattgccagtgtcttctgagcttgatattgatcaaaatgtgaagaaattattagacgccctcaaaacaaaggcaggtgaaaaaaaagttcaaattaaggaaatcatgggagaaatcgactggaagtctttgccaacagaatggaagacatctccaactgccatcaaaaatagcattgttaagcaattcaaggaaattttcaaatga

SEQ ID NO: 10545 - DNA, 1455 bp, Saccharomyces cerevisiae
atgggtaaaaataagaagaaaacaggtaagaaggccaagagtcatcctcatgtggaggacgttgatgaaaccgtcaataaacctgaagaaatcatcaattctgtaaacgtcaccgttcctccaaaaatgtccacagatccagaggctgatggtatcgtggcaagcccggacgatgaggggaaagatctctctgaaggagtagacaaacaaaaagtaaatgacggcctgactgtagacaccataaatcctttagaggacaaaaaggctggtgatgagatgaaggaactaagggaagaaattgaacgtttaaaattggaactaagccacaagaaggatcaagaaacgcctaatgaagacttcaaaaatgaactagcaaatgttattaaggaaagagacgaattcaaaacacagtatgacacattattgagcaagatatcttctatgaaatcaatttttaataagatgaaagaagcacaaaaacaattagaggaagtgcaggagcagcttactgaatatgaatcacaaaatctgaaattgaagaagaaacttgaagctaccaagaccgaaaactctgaattacaatccacgattgtgaccctaaatacagagttagaaaacctagaaaaggagcaagaaagtacagaagaggtttttttggaatacgaatcaaggatagaagctttggaagatgaaaaacacgacataattgaaaaacatagtaaggaacttaacacttacaggaaggaaaaagatcaattaaatctccaagttcaggaactcatgataatcttagaaaataataaacaagatatatctgacttgagaacagaaagagatgaattgagacaggctttggaatcccatgaaaaggagaaagcagtattaaagaattctctaaatgatctggaattgaagatagaagaagttgacaacaaaagggaagaagaggctagagagagagaccaggaagtcaaatctttacgatcccaacttgacacggagatagaaacgcacaacaatgacacagaagctttagaaagcatgaaaaaacagctagaagccatgaaggaggacgcctctatgaaggaaaaatatgaggaagaatctaagcagcacatcttacagatcggaaaactacgtcacgaagccattatactaaatgagcatttaacaaaggcactggccatgttgaagaaatcaagcgattctgaatccgttgataaagaactgatatccaatctattgatatctttcgtgtccatacccagagcagacccaagaaagtttgaagttcttgaattactgtccaatttcttaaactgggatgaagataagaaacaacaggccggcttgatctcgaataatgagtctaagaattcaagcgctgtatcgagaacggaaagctttgtatcgctttggaccaactacctcgagaaagagagtgagaaagactaa

SEQ ID NO: 10546 - DNA, 1455 bp, Artificial Sequence
  Description of Artificial Sequence: Synthetic polynucleotide
atgggtaaaaataagaagaaaacaggtaagaaggccaagagtcatcctcatgtggaggacgttgatgaaaccgtcaataaacctgaagaaatcatcaattctgtaaacgtcaccgttcctccaaaaatgtccacagatccagaggctgatggtatcgtggcaagcccggacgatgaggggaaagatctctctgaaggagtagacaaacaaaaagtaaatgacggcttaactgtagacaccataaatcctttagaggacaaaaaggctggtgatgagatgaaggaattgagggaagaaattgaacgtttaaaattggaattgagccacaagaaggatcaagaaacgcctaatgaagacttcaaaaatgaattggcaaatgttattaaggaaagagacgaattcaaaacacagtatgacacattattgagcaagatatcttctatgaaatccatttttaataagatgaaagaagcacaaaaacaattagaggaagtgcaggagcagcttactgaatatgaatctcaaaatttgaaattgaagaagaaacttgaagctaccaagaccgaaaactctgaattacaatccacgattgtgaccttgaatacagagttagaaaacttggaaaaggagcaagaaagtacagaagaggtttttttggaatacgaaagtaggatagaagctttggaagatgaaaaacacgacataattgaaaaacatagtaaggaacttaacacttacaggaaggaaaaagatcaattaaatctccaagttcaggaactcatgataatcttagaaaataataaacaagatatatctgacttgagaacagaaagagatgaattgagacaggctttggaatcccatgaaaaggagaaagcagtattaaagaattctttgaatgatttggaattgaagatagaagaagttgacaacaaaagggaagaagaggctagagagagagaccaggaagtcaaatctttaagatcccaacttgacacggagatagaaacgcacaacaatgacacagaagctttagaaagcatgaaaaaacagttagaagccatgaaggaggacgcctctatgaaggaaaaatatgaggaagaatctaagcagcacatcttacagatcggaaaattacgtcacgaagccattatattgaatgagcatttaacaaaggcattggccatgttgaagaaaagtagcgattctgaatccgttgataaagaattgatatccaatttattgatatctttcgtgtccatacccagagcagacccaagaaagtttgaagttcttgaattattatccaatttcttaaactgggatgaagataagaaacaacaggccggcttgatctctaataatgagtctaagaatagtagcgctgtatctagaacggaaagctttgtatctctttggaccaactacctcgagaaagagagtgagaaagactga

SEQ ID NO: 10547 - DNA, 2586 bp, Saccharomyces cerevisiae
atggtcaatatttctgatttctttggtaaaaataagaaatccgtaagatcgtcaacatccagacctacgagacaggtgggttcgtctaaaccagaagttatcgacttagatactgaatctgaccaagaatcaaccaataaaacaccaaagaagatgcctgtaagtaatgtaattgatgtatcagagacacctgaaggagaaaaaaagctacctcttcccgctaagaggaaggcctcttcaccaactgtaaagccagcaagttcaaaaaaaaccaaaccctcctctaaaagttcagactcggcttcgaatattacggctcaagatgtactagataagattccatccttggatctgtcaaatgttcatgtgaaagagaatgctaaatttgatttcaaaagcgcaaattcaaatgcggatccagatgaaattgtttctgaaataggtagttttccagaaggaaagccaaattgtttattaggtctaacaattgtcttcacaggtgttctgccaaccttggagcgtggtgcatcggaagctttagcgaaaagatacggagcaagggttactaaatcaatttcaagcaaaacttctgtagtagtcttaggtgatgaagcagggccaaagaaactagaaaaaatcaagcaattgaaaatcaaagccatagacgaagaaggctttaagcaattaattgctgggatgcctgctgaaggtggtgacggggaagctgccgaaaaagcacgtcgaaaattagaagaacagcataatattgctaccaaagaagcagaattgcttgttaagaaagaagaggaaaggtcgaagaagcttgcagccactagagtttctggtggccatctggagagagacaatgtggttagggaagaagataaattgtggacagtaaagtacgcaccaacgaatctacaacaggtctgtggtaacaaaggaagtgtaatgaaattaaaaaactggttggctaattgggaaaattcaaagaaaaatagttttaaacatgctggtaaagatggctctggtgttttcagggctgcaatgttatacggtcctcctggtattgggaagacaactgctgctcatttagttgcacaagagcttgggtatgacattcttgaacaaaacgcttctgatgttcgctctaaaactttacttaatgccggtgttaaaaacgctcttgataacatgtctgtagtgggatatttcaaacacaacgaagaagctcaaaatttgaacgggaaacattttgtcattatcatggatgaagttgatggtatgagcggaggcgatagggggggagttggccagctggcacagttttgtcgtaagacgtcaactccattgattctaatttgtaatgaacgtaatttaccaaaaatgagaccattcgatagagtatgtcttgatatccaatttagaagacctgatgctaacagtatcaaatcaagattaatgacaattgcgatcagagaaaagttcaaacttgatccaaatgtcattgataggttgatacagactacaagaggtgatatccgccaggttattaatctactttcaacgatatctacgactactaaaaccataaaccatgaaaatatcaacgagatctcaaaggcatgggaaaagaatattgccctaaaaccctttgacattgcccataaaatgttggatggacaaatatactcagacataggttcaaggaactttacactgaatgataagatcgcattatattttgatgactttgatttcacacccctaatgattcaggaaaactatttatctacaagaccaagcgttttgaaacccggccagtcacatttggaagcagttgctgaggcggctaactgtatttcattaggtgatattgtcgaaaagaagattcgtagtagtgagcaattatggagtcttttgcctttgcatgctgttctttcatctgtttatccagcatcaaaagttgccggccatatggcgggaagaatcaatttcacagcttggttgggccaaaattctaaatctgccaaatattataggttactgcaagagatacattatcatacaagactaggtacatctactgataaaattggactaaggctggattacctaccaacttttagaaaaagattattggacccatttttgaagcaaggtgctgatgcaatttcatctgtcatagaggtaatggacgattactatttgaccaaagaagactgggattctattatggagtttttcgtaggtcctgatgtgaccacagccattatcaaaaagataccagctacggttaaaagtggattcacgcggaaatacaacagtatgacacatccagtcgcaatttacagaacaggtagtactattggtggtggtggtgttggcaccagtactagcacccccgatttcgaagatgtcgttgacgcagatgacaatccagttcccgcagatgatgaagaaacacaagatagtagcacagacttgaagaaggataaacttatcaagcagaaagccaaacctacgaagaggaagactgccaccagtaaacctggtggtagcaaaaaaaggaaaacgaaagcatga

SEQ ID NO: 10548 - DNA, 2586 bp, Artificial Sequence
  Description of Artificial Sequence: Synthetic polynucleotide
atggtcaatatttctgatttctttggtaaaaataagaaatccgtaagaagttctacatccagacctacgagacaggtgggttcttctaaaccagaagttatcgacttagatactgaatctgaccaagaaagtaccaataaaacaccaaagaagatgcctgtaagtaatgtaattgatgtatctgagacacctgaaggagaaaaaaagttacctcttcccgctaagaggaaggcctcttctccaactgtaaagccagcaagttctaaaaaaaccaaaccctcctctaaaagtagtgactctgcttctaatattacggctcaagatgtattggataagattccatccttggatttatccaatgttcatgtgaaagagaatgctaaatttgatttcaaaagcgcaaatagtaatgcggatccagatgaaattgtttctgaaataggtagttttccagaaggaaagccaaattgtttattaggtttaacaattgtcttcacaggtgttttgccaaccttggagcgtggtgcatctgaagctttagcgaaaagatacggagcaagggttactaaatccatttctagcaaaacttctgtagtagtcttaggtgatgaagcagggccaaagaaattagaaaaaatcaagcaattgaaaatcaaagccatagacgaagaaggctttaagcaattaattgctgggatgcctgctgaaggtggtgacggggaagctgccgaaaaagcacgtcgtaaattagaagaacagcataatattgctaccaaagaagcagaattgcttgttaagaaagaagaggaaaggtctaagaagcttgcagccactagagtttctggtggccatttagagagagacaatgtggttagggaagaagataaattgtggacagtaaagtacgcaccaacgaatttacaacaggtctgtggtaacaaaggaagtgtaatgaaattaaaaaactggttggctaattgggaaaattctaagaaaaatagttttaaacatgctggtaaagatggctctggtgttttcagggctgcaatgttatacggtcctcctggtattgggaagacaactgctgctcatttagttgcacaagagcttgggtatgacattcttgaacaaaacgcttctgatgttcgctctaaaactttacttaatgccggtgttaaaaacgctcttgataacatgtctgtagtgggatatttcaaacacaacgaagaagctcaaaatttgaacgggaaacattttgtcattatcatggatgaagttgatggtatgagcggaggcgatagggggggagttggccagttagcacagttttgtcgtaagacgtctactccattgattttaatttgtaatgaacgtaatttaccaaaaatgagaccattcgatagagtatgtcttgatatccaatttagaagacctgatgctaacagtatcaaatctagattaatgacaattgcgatcagagaaaagttcaaacttgatccaaatgtcattgataggttgatacagactacaagaggtgatatccgccaggttattaatttactttctacgatatctacgactactaaaaccataaaccatgaaaatatcaacgagatctccaaggcatgggaaaagaatattgccttgaaaccctttgacattgcccataaaatgttggatggacaaatatacagtgacataggttctaggaactttacattaaatgataagatcgcattatattttgatgactttgatttcacacccttgatgattcaggaaaactatttatctacaagaccaagcgttttgaaacccggccagtctcatttggaagcagttgctgaggcggctaactgtatttctttaggtgatattgtcgaaaagaagattcgtagtagtgagcaattatggagtcttttgcctttgcatgctgttctttcttctgtttatccagcatccaaagttgccggccatatggcgggaagaatcaatttcacagcttggttgggccaaaattctaaatctgccaaatattataggttattacaagagatacattatcatacaagattaggtacatctactgataaaattggattgaggttagattacttgccaacttttagaaaaagattattggacccatttttgaagcaaggtgctgatgcaatttcttctgtcatagaggtaatggacgattactatttgaccaaagaagactgggattctattatggagtttttcgtaggtcctgatgtgaccacagccattatcaaaaagataccagctacggttaaaagtggattcacgagaaaatacaacagtatgacacatccagtcgcaatttacagaacaggtagtactattggtggtggtggtgttggcaccagtactagcacccccgatttcgaagatgtcgttgacgcagatgacaatccagttcccgcagatgatgaagaaacacaagatagtagcacagacttgaagaaggataaacttatcaagcagaaagccaaacctacgaagaggaagactgccaccagtaaacctggtggtagcaaaaaaaggaaaacgaaagcatga

SEQ ID NO: 10549 - DNA, 2796 bp, Saccharomyces cerevisiae
atgtctgcttcaactcattcgcataaaaggaagaatagtcatttatttccgcaaaggaaaagttcaaactcttccatggataagccattctttcctaataacgatagtgtagctaacacagatcctcaaagtaacgagaatggacatacaattaacgagattagaccgacagaagctacaatagatgttacagatgttcctcaaaccccctttctccaggaacaatactcaatgcgtcccagacgagaaagcttccagtttaatgatattgaaaaccagcatcacacgcattcctttttcagtgtaaacaaatttaatcgtcgatggggagaatggtctctgcccgagaaaagatcttatgtcttagtctttacattaatagcactatcagttttagttctacttgttattctaataccttcaaaacttctacctaccaaaatcacgcgtcctaagacatctgcaggagattctagtttgggcaaaagatctttctcaattgaaaacgttttgaacggagattttgccatccctgaggatactttccactttattgacccaccacagcgcttattaggccaagactcagatccggggctatattttactacaaaagaaattgatggacatacgaattttattgcaaagcagttatttgatgagacttttgaagtaaaccttgggggcaataggttcctatatgaaggagtagaatttaccgtaagtactgtccaaattaattataaattggataaacttatatttggaactaacttagagtctgagtttagacactcctcgaaggggttttattggatcaaagacttaaacacaggtaatattgaaccgatattacctcccgaaaaatcagatgataattatgaacttggattatcaaaactttcctatgcgcatttttctcctgcatacaattatatctattttgtttacgagaacaatctgtttctgcaacaagtaaatagcggagttgccaagaaggtaacggaagatggctccaaggatatattcaatgccaaaccagactggatatatgaagaagaggtccttgcttctgatcaagcaatatggtgggctccagacgattcgaaggctgtatttgcaagattcaatgacaccagtgttgacgatatccgattaaaccgttacacaaatatgaacgaagcatacctttccgacaccaaaatcaaatacccgaagccagggttccaaaatccacagttcgacttgtttctcgttaacttacagaacggtataatttactcaattaatactggtggtcagaaggattccattctgtataacggaaaatggattagtccagatacattcaggttcgaaatcaccgatagaaactctaagatattagacgtaaaagtgtatgatataccatcatctcaaatgcttactgtgaggaacaccaattcaaacctgttcaacggatggatcgaaaagacgaaggatattttaagcatccccccaaagccagagttgaaaagaatggattatgggtacattgatattcatgcagacagtagagggttcagtcatctcttttattacccaaccgtttttgccaaagagcctatccagttgaccaaagggaactgggaagtgactggaaatggaatagtcggctacgaatatgaaacagatactatattttttactgccaatgagattggtgtcatgtcacaacacctttatagtatcagccttacggattctacaactcagaatactttccaaagtttacaaaacccatcagacaaatacgatttttatgacttcgaattaagttctagtgcgagatatgctatttctaaaaaactggggcctgatacacctattaaagtagctggtccgcttacaagggttttgaacgttgccgaaattcacgatgattcaatcttgcaactgacgaaggatgaaaagttcaaggaaaaaataaagaactacgatttacctattacaagctataaaaccatggtcctagacgatggcgtagaaataaattacattgagatcaaaccagccaatttaaatcctaaaaaaaaatacccgatattagtcaacatttatggtggtccaggatctcaaacatttaccaccaagtcgtctcttgcgtttgaacaagcagttgtttcaggattagatgttatcgtcctacaaatagagcccagaggaactgggggtaaaggttggagttttagatcatgggcccgcgaaaaattaggatattgggaacctagagacattactgaagtcacaaaaaaattcatacaaaggaatagccaacatatagatgaaagcaaaattgctatttggggttggtcatacggcggttttactagcttgaaaaccgtggaattagacaacggcgacacatttaaatacgccatggctgtcgcgccagtaacaaactggacattgtatgattccgtttacacggaaagatatatgaaccaaccatcggaaaaccatgaaggctattttgaagtatccaccatccaaaatttcaaatcattcgaatctttaaagcgtcttttcattgtgcacggaactttcgatgataatgttcacatacaaaatacttttagattagttgatcaactgaatctattgggattgacgaactatgacatgcacatttttccagactctgatcattccatccggtaccacaacgctcaaagaattgtattccaaaaactatactattggttaagggatgcctttgctgaacgctttgacaacactgaagttttgcatttataa

SEQ ID NO: 10550 - DNA, 2796 bp, Artificial Sequence
  Description of Artificial Sequence: Synthetic polynucleotide
atgtctgcttccactcattctcataaaaggaagaatagtcatttatttccgcaaaggaaaagtagtaactcttccatggataagccattctttcctaataacgatagtgtagctaacacagatcctcaaagtaacgagaatggacatacaattaacgagattagaccgacagaagctacaatagatgttacagatgttcctcaaaccccctttctccaggaacaatactccatgcgtcccagaagagaaagcttccagtttaatgatattgaaaaccagcatcacacgcattcctttttcagtgtaaacaaatttaatcgtcgttggggagaatggtctttacccgagaaaagatcttatgtcttagtctttacattaatagcattaagtgttttagttttacttgttattttaataccttccaaacttttacctaccaaaatcacgcgtcctaagacatctgcaggagattctagtttgggcaaaagatctttctccattgaaaacgttttgaacggagattttgccatccctgaggatactttccactttattgacccaccacagcgcttattaggccaagacagtgatccggggttatattttactacaaaagaaattgatggacatacgaattttattgcaaagcagttatttgatgagacttttgaagtaaaccttgggggcaataggttcctctatgaaggagtagaatttaccgtaagtactgtccaaattaattataaattggataaacttatatttggaactaacttagagtctgagtttagacactcctccaaggggttttattggatcaaagacttaaacacaggtaatattgaaccgatattacctcccgaaaaatctgatgataattatgaacttggattatccaaactttcctatgcgcatttttctcctgcatacaattatatctattttgtttacgagaacaatttatttttgcaacaagtaaatagcggagttgccaagaaggtaacggaagatggctccaaggatatattcaatgccaaaccagactggatatatgaagaagaggtccttgcttctgatcaagcaatatggtgggctccagacgattctaaggctgtatttgcaagattcaatgacaccagtgttgacgatatcagattaaaccgttacacaaatatgaacgaagcatacctttccgacaccaaaatcaaatacccgaagccagggttccaaaatccacagttcgacttgtttctcgttaacttacagaacggtataatttactctattaatactggtggtcagaaggattccattctttataacggaaaatggattagtccagatacattcaggttcgaaatcaccgatagaaactctaagatattagacgtaaaagtgtatgatataccatcttctcaaatgcttactgtgaggaacaccaatagcaacttgttcaacggatggatcgaaaagacgaaggatattttaagcatccccccaaagccagagttgaaaagaatggattatgggtacattgatattcatgcagacagtagagggttcagtcatctcttttattacccaaccgtttttgccaaagagcctatccagttgaccaaagggaactgggaagtgactggaaatggaatagtcggctacgaatatgaaacagatactatattttttactgccaatgagattggtgtcatgtctcaacacctttatagtatcagccttacggattctacaactcagaatactttccaaagtttacaaaacccatctgacaaatacgatttttatgacttcgaattaagttctagtgcgagatatgctatttctaaaaaattggggcctgatacacctattaaagtagctggtccgcttacaagggttttgaacgttgccgaaattcacgatgattctatcttgcaattaacgaaggatgaaaagttcaaggaaaaaataaagaactacgatttacctattacaagctataaaaccatggtcttggacgatggcgtagaaataaattacattgagatcaaaccagccaatttaaatcctaaaaaaaaatacccgatattagtcaacatttatggtggtccaggatctcaaacatttaccaccaagtcttctcttgcgtttgaacaagcagttgtttctggattagatgttatcgtcttacaaatagagcccagaggaactgggggtaaaggttggagttttagaagttgggcccgcgaaaaattaggatattgggaacctagagacattactgaagtcacaaaaaaattcatacaaaggaatagccaacatatagatgaaagcaaaattgctatttggggttggagttacggcggttttactagcttgaaaaccgtggaattagacaacggcgacacatttaaatacgccatggctgtcgcgccagtaacaaactggacattgtatgattccgtttacacggaaagatatatgaaccaaccatctgaaaaccatgaaggctattttgaagtatccaccatccaaaatttcaaatctttcgaatctttaaagcgtcttttcattgtgcacggaactttcgatgataatgttcacatacaaaatacttttagattagttgatcaattgaatttattgggattgacgaactatgacatgcacatttttccagactctgatcattccatcagataccacaacgctcaaagaattgtattccaaaaactttactattggttaagggatgcctttgctgaacgctttgacaacactgaagttttgcatttatga

SEQ ID NO: 10551 - DNA, 798 bp, Saccharomyces cerevisiae
atggcaaaccaaaagcaaatgagaactcaaatactaatcacggacattcctagtggcaaatttactagtaaatggcctacacaactggaaaaaactttattcaaggagcaatttccaaatttacaaagtcacttgcagtattacacgccgttgccatttttaaacagaattataatcatatttgataatgaagatgacacgctgcaagtgtttaagttcttacaggaattgttagctaaggagaatagcggtccgatgaagttatttgtaactgagtcccttttaaataatcaacatccgcgatctcgttccacggatgatgctgtttcgttgcaagataataacttggcacttttggaggatcatcgcaacaaaccgctcttatctattaatacagatccaggagtcactggagtagacagttcatccctcaataagggaggctcttcattatctccggataaatcatctctagaatcgcccacaatgttgaagctttcgacggattcaaagccatttagttaccaagaaccgctaccaaagctttctaggtcgtcttcttcaacttcgaacctctcattgaacagaagttcacagacatcattaccttcacaactagaaaataaggataagtcagcgtcaggcaccaaatgccttttcgcctctaagccactaggattgaccattgatacttctactagaagtaatgctgcatcgtgtaccgaaaatgatgtaaacgctactgcctcaaatcctccaaaaagtccaagcataacggttaacgagtttttccattag

SEQ ID NO: 10552 - DNA, 798 bp, Artificial Sequence
  Description of Artificial Sequence: Synthetic polynucleotide
atggcaaaccaaaagcaaatgagaactcaaatattgatcacggacattcctagtggcaaatttactagtaaatggcctacacaattggaaaaaactttattcaaggagcaatttccaaatttacaaagtcacttgcagtattacacgccgttgccatttttaaacagaattataatcatatttgataatgaagatgacacgttacaagtgtttaagttcttacaggaattgttagctaaggagaatagcggtccgatgaagttatttgtaactgagtcccttttaaataatcaacatccgagatctcgttccacggatgatgctgtttctttgcaagataataacttggcacttttggaggatcatcgcaacaaaccgctcttatctattaatacagatccaggagtcactggagtagacagttcttccctcaataagggaggctcttctttatctccggataaatcttctttggaaagtcccacaatgttgaagctttctacggattctaagccatttagttaccaagaaccgttaccaaagctttctaggtcttcttcttctacttctaacctctctttgaacagaagttctcagacaagtttaccttctcaattggaaaataaggataagtctgcgtctggcaccaaatgccttttcgcctctaagccattaggattgaccattgatacttctactagaagtaatgctgcatcttgtaccgaaaatgatgtaaacgctactgcctctaatcctccaaaaagtccaagcataacggttaacgagtttttccattga

SEQ ID NO: 10553 - DNA, 1083 bp, Saccharomyces cerevisiae
atgaagctactaaccttcccaggtcaagggacctccatctccatttcgatattaaaagcgataataagaaacaaatcaagagaattccaaacaatactgagtcagaacggcaaggaatcaaatgatctattgcagtacatcttccagaacccttccagccccggaagcattgcagtctgctccaaccttttctatcaattgtaccagatactctcgaatccttctgatcctcaagatcaagcaccaaaaaatatgactaagatcgattcccccgacaagaaagacaatgaacaatgttaccttttgggtcactcgctaggcgagttaacatgtctgagtgttaattcactgttttcgttaaaggatctttttgatattgctaattttagaaataagttaatggtaacatctactgaaaagtacttagtagcccacaatatcaacagatccaacaaatttgaaatgtgggcactctcttctccgagggccacagatttaccgcaagaagtgcaaaaactactaaattcccctaatttattatcatcttcacaaaataccatttctgtagcaaatgcaaattcagtaaagcaatgtgtagtcaccggtctggttgatgatttagagtccttaagaacagaattgaacttaaggttcccgcgtttaagaattacagaattaactaacccatacaacatccccttccataatagcactgtgttgaggcccgttcaggaaccactctatgactacatttgggatatattaaagaaaaacggaactcacacgttgatggagttgaaccatccaataatagctaacttagatggtaatatatcttactatattcatcatgccctagatagattcgttaagtgttcaagcaggactgtgcaattcaccatgtgttatgataccataaactctggaaccccagtggaaattgataagagtatttgctttggcccgggcaatgtgatttataaccttattcggagaaattgtccccaagtggacactatagaatacacctctttagcaactatagacgcttatcacaaggcggcagaggagaacaaagattga

SEQ ID NO: 10554 - DNA, 1083 bp, Artificial Sequence
  Description of Artificial Sequence: Synthetic polynucleotide
atgaagttattaaccttcccaggtcaagggacctccatctccatttctatattaaaagcgataataagaaacaaatctagagaattccaaacaatattgagtcagaacggcaaggaaagtaatgatttattgcagtacatcttccagaacccttccagccccggaagcattgcagtctgctccaaccttttctatcaattgtaccagatactctctaatccttctgatcctcaagatcaagcaccaaaaaatatgactaagatcgattcccccgacaagaaagacaatgaacaatgttaccttttgggtcactctttaggcgagttaacatgtttaagtgttaattctttattttctttaaaggatctttttgatattgctaattttagaaataagttaatggtaacatctactgaaaagtacttagtagcccacaatatcaacagatccaacaaatttgaaatgtgggcactctcttctccgagggccacagatttaccgcaagaagtgcaaaaattattgaattcccctaatttattatcttcttctcaaaataccatttctgtagcaaatgcaaattctgtaaagcaatgtgtagtcaccggtttagttgatgatttagagtccttaagaacagaattgaacttaaggttcccgcgtttaagaattacagaattaactaacccatacaacatccccttccataatagcactgtgttgaggcccgttcaggaaccactctatgactacatttgggatatattaaagaaaaacggaactcacacgttgatggagttgaaccatccaataatagctaacttagatggtaatatatcttactatattcatcatgccttggatagattcgttaagtgtagcagcaggactgtgcaattcaccatgtgttatgataccataaactctggaaccccagtggaaattgataagagtatttgctttggcccgggcaatgtgatttataaccttattagaagaaattgtccccaagtggacactatagaatacacctctttagcaactatagacgcttatcacaaggcggcagaggagaacaaagattga

SEQ ID NO: 10555 - DNA, 924 bp, Saccharomyces cerevisiae
atgtcatcagactcaaacgcaaagccattgccttttatatatcagttcatatcaggtgccgtcgccggtatttctgagttaactgttatgtatccgcttgatgttgttaagacaagatttcaactggaggtgacgacgcctactgccgctgcagtaggaaagcaagtagagagatataatggtgtcatcgattgtttgaaaaaaattgtaaagaaggaagggtttagcagactttacagaggtattagttcaccaatgttgatggaagcaccaaagagagccaccaaatttgcatgtaacgatcaatatcaaaaaatcttcaaaaacctattcaacacgaatgaaactacgcagaagatctccattgcggctggtgcatctgctggtatgacagaagctgcagttattgttccatttgaattgatcaaaatcaggatgcaagacgtcaagtccagctatcttggaccaatggactgtttgaaaaaaacaatcaaaaacgaaggtattatggggctatacaagggtatcgaatctaccatgtggagaaacgctctttggaatggtggctacttcggtgttatctaccaagtgagaaattccatgcccgtagcaaagacaaagggacaaaagaccagaaatgaccttattgcaggtgcgatcggtggtacggtcgggaccatgcttaacactccctttgacgtggtgaaatccagaatccaaagtgtggacgcggtcagcagtgctgttaaaaaatacaactggtgcctaccttcgctattggtcatataccgtgaagaaggcttcagagcattgtacaaaggtttcgtccccaaagtatgtagactagcacccggtggttcattaatgttggtggtttttaccggtatgatgaactttttcagggatctgaagtacggacactga

SEQ ID NO: 10556 - DNA, 924 bp, Artificial Sequence
  Description of Artificial Sequence: Synthetic polynucleotide
atgtcttctgactccaacgcaaagccattgccttttatatatcagttcatatctggtgccgtcgccggtatttctgagttaactgttatgtatccgcttgatgttgttaagacaagatttcaattggaggtgacgacgcctactgccgctgcagtaggaaagcaagtagagagatataatggtgtcatcgattgtttgaaaaaaattgtaaagaaggaagggtttagcagactttacagaggtattagttctccaatgttgatggaagcaccaaagagagccaccaaatttgcatgtaacgatcaatatcaaaaaatcttcaaaaacttgttcaacacgaatgaaactacgcagaagatctccattgcggctggtgcatctgctggtatgacagaagctgcagttattgttccatttgaattgatcaaaatcaggatgcaagacgtcaagtccagctatcttggaccaatggactgtttgaaaaaaacaatcaaaaacgaaggtattatggggttatacaagggtatcgaatctaccatgtggagaaacgctctttggaatggtggctacttcggtgttatctaccaagtgagaaattccatgcccgtagcaaagacaaagggacaaaagaccagaaatgaccttattgcaggtgcgatcggtggtacggtcgggaccatgcttaacactccctttgacgtggtgaaatccagaatccaaagtgtggacgcggtcagcagtgctgttaaaaaatacaactggtgccttccttctttgttggtcatataccgtgaagaaggcttcagagcattgtacaaaggtttcgtccccaaagtatgtagattagcacccggtggttctttaatgttggtggtttttaccggtatgatgaactttttcagggatttgaagtacggacactga

SEQ ID NO: 10557 - DNA, 879 bp, Saccharomyces cerevisiae
atgtccgcagaaccattattacccacacataacggatcgcagggaggggaagtgaggtccccagatcagaagttcattgtgatacggttttccgacgtatcagtaagggatctgcagttgaacatatcaaatgtaccattttcgaatataaatacccactggctacgtcggatgtgtagagaattgaggccccaacaaacacaaaaaagaagactgaagtttataaggaacgggagtattctgaatacgcattccaagattgctgaggaactgacgcattacttcgatactgctaataactctaacgtcgcaacaggcaccagcgtggcaccagagcagaacaactactatattcattgtataattggtacagaggagctgacacaagcagagttagccaacgaagatctaaaggacgatgcaactccgtccaatgactccatgaccacgcaggccatcgggtttgataggctacgatccgtgggatttactgagcaagaaatcgaactgctgaggcaacagtttcgggccacgtatggagatttggaggaggaggaggagagacttgctcaaaatggcaacagagatgatgagggccatgacattagacagttggaggaacagtggatggaaagcgggagtgggaccgctcaggggaatggggccggaggcggcaatgaagacaggtttaactctgtgccgatcgctaacataaagcacaacaaagacttgcttttaggtatatgtgtcggattcttcttcggcgtctttggtatactattaatgaagtttgatggattgttcaacagacggcaaaaaatggcgatttttgccggtgtgattgttaatgttatgttttgtcttgtgagaggtttttag

SEQ ID NO: 10558 - DNA, 879 bp, Artificial Sequence
  Description of Artificial Sequence: Synthetic polynucleotide
atgtccgcagaaccattattacccacacataacggatctcagggaggggaagtgaggtccccagatcagaagttcattgtgataagattttccgacgtatctgtaagggatttacagttgaacatatccaatgtaccattttctaatataaatacccactggcttcgtcgtatgtgtagagaattgaggccccaacaaacacaaaaaagaagattaaagtttataaggaacgggagtattttgaatacgcattccaagattgctgaggaattgacgcattacttcgatactgctaataactctaacgtcgcaacaggcaccagcgtggcaccagagcagaacaactactatattcattgtataattggtacagaggagttgacacaagcagagttagccaacgaagatttgaaggacgatgcaactccgtccaatgactccatgaccacgcaggccatcgggtttgataggcttcgttccgtgggatttactgagcaagaaatcgaattattgaggcaacagtttagagccacgtatggagatttggaggaggaggaggagagacttgctcaaaatggcaacagagatgatgagggccatgacattagacagttggaggaacagtggatggaaagcgggagtgggaccgctcaggggaatggggccggaggcggcaatgaagacaggtttaactctgtgccgatcgctaacataaagcacaacaaagacttgcttttaggtatatgtgtcggattcttcttcggcgtctttggtatattattaatgaagtttgatggattgttcaacagaagacaaaaaatggcgatttttgccggtgtgattgttaatgttatgttttgtcttgtgagaggtttttga

SEQ ID NO: 10559 - DNA, 441 bp, Saccharomyces cerevisiae
atgtctaacactctatttgatgatatattccaagtctcggaagttgatcccggtcgttataacaaagtctgccgtatcgaagccgcatctaccactcaggaccaatgcaaactaaccttggatataaatgttgaattgtttcccgtcgccgcacaagattctttgacagtgactattgcatcctctttaaacctcgaagacaccccagctaacgactcttctgcgacaagaagctggagacctccacaggctggtgacagatcccttgcagatgattatgattacgtcatgtatggtaccgcttacaagtttgaggaagtaagcaaggatctaattgccgtttactactcattcggtggcctcttaatgagattagaaggtaactatagaaatttgaataacttgaagcaagagaacgcttatcttttgattcgtcgttag

SEQ ID NO: 10560 - DNA, 441 bp, Artificial Sequence
  Description of Artificial Sequence: Synthetic polynucleotide
atgtctaacactttatttgatgatatattccaagtcagtgaagttgatcccggtcgttataacaaagtctgccgtatcgaagccgcatctaccactcaggaccaatgcaaattgaccttggatataaatgttgaattgtttcccgtcgccgcacaagattctttgacagtgactattgcatcctctttaaacctcgaagacaccccagctaacgactcttctgcgacaagaagctggagacctccacaggctggtgacagatcccttgcagatgattatgattacgtcatgtatggtaccgcttacaagtttgaggaagtaagcaaggatttgattgccgtttactactctttcggtggcctcttaatgagattagaaggtaactatagaaatttgaataacttgaagcaagagaacgcttatcttttgattcgtcgttga

SEQ ID NO: 10561 - DNA, 471 bp, Saccharomyces cerevisiae
atgttcgccagactcgctaatcctgcccacttcaagcctctcacgggctcccacataacaagagctgccaaaagactttaccatcctaaggtaattgaccactacacaaacccaagaaacgttgggtccatggataagtccttagctaatgtcggcacaggaatcgtgggcgcccctgcgtgtggtgatgtgataaaactacaaatacaggtgaatgataaatcgggtattatcgagaacgttaagttcaagaccttcgggtgtgggtctgccatcgcttcctcctcctacatgaccgagctggtacgcggtatgtcacttgatgaggccgttaaaattaaaaacacggaaatcgcgaaggagctaagtcttcctccagtaaaactgcattgttccatgcttgcagaagacgctatcaaggcggcaatcaaggactacaaaacaaagaggaacccctccgttttgcattga

SEQ ID NO: 10562 - DNA, 471 bp, Artificial Sequence
  Description of Artificial Sequence: Synthetic polynucleotide
atgttcgccagactcgctaatcctgcccacttcaagcctctcacgggctcccacataacaagagctgccaaaagactttaccatcctaaggtaattgaccactacacaaacccaagaaacgttgggtccatggataagtccttagctaatgtcggcacaggaatcgtgggcgcccctgcgtgtggtgatgtgataaaattacaaatacaggtgaatgataaatctggtattatcgagaacgttaagttcaagaccttcgggtgtgggtctgccatcgcttcctcctcctacatgaccgagttggtacgcggtatgtctcttgatgaggccgttaaaattaaaaacacggaaatcgcgaaggagttgagtcttcctccagtaaaattgcattgttccatgcttgcagaagacgctatcaaggcggcaatcaaggactacaaaacaaagaggaacccctccgttttgcattga

SEQ ID NO: 10563 - DNA, 3741 bp, Saccharomyces cerevisiae
atgagctccaagttgaagtacactgatatagatgtgccattggactggttgtataaggggaaacgaaggaataggaccaaaagtgcggcttccacgcgcacttcagaagctaccaccacctctgtaaagaaaactgctactttgccatcaaccgcagctgttcctacgaaaactatagcttctcctcaaaggcccctgagcggccagaatgtaaataacgaattatccaactctaaaccagcagtatccgccgagaaggtttcgcagcaaggacaagtgcccactaggaggactcgttctcactcagtatcgtacggcctactccagaagaagaataataacgatgacaccacagattctcctaaaatatctcgaattagaacggcacaggatcaacctgttaaggaaacaaaaagcagcacccttgcggaacccatcgtttcaaagaaggggagaagtcgttcttcttctatatcaacttctttgaatgaacgatctaagaaatctctgttcggttctttgttcgggagaaggccttccaccactccctcgcacgttgttgaaagaccgttgtcttctcagaatgaccataaaaaaagcacagaactccctcctatagataccagacagtcaaagatctccaccccaactagtactcctaccactgcatcttccaaacccagtagttctggtgggaatagacattctgatggatctcttacttcaaaacttctaagtattcctcataacatcttggaaacctcttctacgaattttaatgcccaccaccatatccagtcacatcatagtagtggtcgtgaacaagactcgccccattctgaatcatcagacctccctcccattttagaaaaagaaactacgcaaaaacaattacagaaggtgtcaaaggtaaatttgaaaagggttactattgcagttcaagaatttaactcagatcccccacaacaactaccttctaggaagcctaaaaggggtaatgttctcataccagaagatatgattagtgcccccccactaatctctctgggaattacaaacagcagcgatcaaagcagttttcagtccaatatctctccctcatattcaaaagattctaaagaatataaattagctttggaaaattttaaaaaagcagctaaagaagccgaaaaacatcaaaaggatgcgtattatgttgcagagcgaatggctcaagaagtggcaaactataaggccaggcaattgaagacatcgccgttaactggagcaactaattcagcagcagattcagcgacggatcaagaatcctcctctctagatgctagagcttctaagcttcatatcgataaaccgatcaatgtaggtgcacatcctttcgaaacacatcaggatgataacattaaatactcttctcaccttgaacaaacattggacgtagcttacactagatgctgtcatttgagagaaattttaccaataccgtccactttgagacaggtcaaaggtaaaaccgcacctttgcagactttgaaatttttgaatccaaaaccaaccttagtggatatattatcattttgtgattttattgccataactccgatccataacatcattttcgataatgtgtccttaacccatgatatgttcaagattgtcatttgttctttggtaacctctccggtagtggagaaattggggttaagaaatgttgtgataaacgaacaaagttggaaactactttgcaagtttttattacaaaataaaacattgatcaagctggatatttctcagactaaagcaaggacagatttaaatgattctaactacagagaccaaatggactgggaactattttgcgaagttcttagaaatagagaaggtagacctttggaagaattgcttttgaatggtttaaggtttgacaaaatgtcattcagtcatttcaaaaatatcctacttactttcgcacaaatgaaccctaaaaaccctattcgtctcgggatggctaacgtagaattctcaaccgagtgttttgattttctctttaattggatgtctgaatataacgttcaaggtgtggatttggcctataataatttagaaagtttggcaaaacgaatgatcaaaaaactagctaggcttccttataagcatttggaatattttacccttaacagcactaatatcacctctgttgatgatatgtcctacatactaaaatatctttcacgtttgccaagcataaaatttctagatttgagcaacttgcctcagttattcccggggattttaacatccggctataagtattttccccaatttccacaactgaaacgtattcattttgatttcgacgatctttctataaaagaaacaaccatgcttgtcagcatattagctaagtgtgaaaccctctctcatgtttcattgataggacaaagtcctatgcccgatgcaagtaaaatatccgacagtactgatgaacccgataagtcgaaagatgaaaagaaagaacaaatcgtatttatgagaaatacgctttgggcctcattgtatgcatttgttagggactctcacaatttagttagtttagacgttgactatgatcaagtaccagacgaaattcaatcaagaattgcgttatgcttaatgcataatatgaagagaattatggactctagctttaaattagatgaattgactgtacaagatgatttaatatttgatggttccttgataactgagacagcagaagaagttttgaaaagattaaatgacaaatctttacttcaaaatgatgttgggaagaaatatcttttaaagaaatattttgagaaaatggaaaaggtacatcataatgttcaaaatacaattgattctatgtttgagaaaagaaaatccggcgaactgccactgcaggaaaaggaaaacctactaaggttattgcttcttgagaaaaatttatcaaatattcttgatatttttgcttctatgcccaatatagcagatgtcgtaccattttcaaaagccgataatagtttccctaatattggggatagcacggttagcgcaaactataatgatggtattcgtccatctctaaaacacttagattctgacaggttaatcaacgatgtttcaattcctgaaaacgattcatcaattagaccacacttaatggccaccgactcgggacgaatcatcgatgtgaccactggtaaagctcttcttttcaagagttcgtctaatacctcactggccggcaagagacaggaagaagaggaaggtgaattacataaatggggtgtgtttgtacagcaccaaagctcaagacataactctgggcttccttcatccgccaattcttcgagaattagcgggtcgttaacaccagatagcagtgtcgccggaggaaagaaaggggaatcctctcgcacatctggtacaaggccaaaaatcttaccaaagattcctaccggtgccgaattaagggatgccattattaaagctaagggtattgattctgtagatgatctgattaaaaatgttacctctgaaaaggttggattggaatcattatatggagatgaattgaactctagaagcccgagtaatgacagtttacaagaatcacaacaaaaggcgcctttgcagaggccccttgttgaagatgaaacagtgacaaaaaaatatgacaaactattgaacgatctgtctaatgttcgtcacagtaaaacctaa

SEQ ID NO: 10564 - DNA, 3741 bp, Artificial Sequence
  Description of Artificial Sequence: Synthetic polynucleotide
atgagctccaagttgaagtacactgatatagatgtgccattggactggttgtataaggggaaaagaaggaataggaccaaaagtgcggcttccacgcgcacttctgaagctaccaccacctctgtaaagaaaactgctactttgccatctaccgcagctgttcctacgaaaactatagcttctcctcaaaggcccttaagcggccagaatgtaaataacgaattatccaactctaaaccagcagtatccgccgagaaggtttctcagcaaggacaagtgcccactaggaggactcgttctcactctgtatcttacggcttgctccagaagaagaataataacgatgacaccacagattctcctaaaatatctagaattagaacggcacaggatcaacctgttaaggaaacaaaaagcagcacccttgcggaacccatcgtttccaagaaggggagaagtcgttcttcttctatatctacttctttgaatgaaagatctaagaaatctttattcggttctttgttcgggagaaggccttccaccactccctctcacgttgttgaaagaccgttgtcttctcagaatgaccataaaaaaagcacagaactccctcctatagataccagacagtccaagatctccaccccaactagtactcctaccactgcatcttccaaacccagtagttctggtgggaatagacattctgatggatctcttacttctaaacttttaagtattcctcataacatcttggaaacctcttctacgaattttaatgcccaccaccatatccagtctcatcatagtagtggtcgtgaacaagactctccccattctgaatcttctgacctccctcccattttagaaaaagaaactacgcaaaaacaattacagaaggtgagcaaggtaaatttgaaaagggttactattgcagttcaagaatttaacagtgatcccccacaacaattaccttctaggaagcctaaaaggggtaatgttctcataccagaagatatgattagtgcccccccattgatctctttgggaattacaaacagcagcgatcaaagcagttttcagtccaatatctctccctcttattctaaagattctaaagaatataaattagctttggaaaattttaaaaaagcagctaaagaagccgaaaaacatcaaaaggatgcgtattatgttgcagagagaatggctcaagaagtggcaaactataaggccaggcaattgaagacatctccgttaactggagcaactaattctgcagcagattctgcgacggatcaagaatcctcctctttagatgctagagcttctaagcttcatatcgataaaccgatcaatgtaggtgcacatcctttcgaaacacatcaggatgataacattaaatactcttctcaccttgaacaaacattggacgtagcttacactagatgctgtcatttgagagaaattttaccaataccgtccactttgagacaggtcaaaggtaaaaccgcacctttgcagactttgaaatttttgaatccaaaaccaaccttagtggatatattatctttttgtgattttattgccataactccgatccataacatcattttcgataatgtgtccttaacccatgatatgttcaagattgtcatttgttctttggtaacctctccggtagtggagaaattggggttaagaaatgttgtgataaacgaacaaagttggaaattactttgcaagtttttattacaaaataaaacattgatcaagttggatatttctcagactaaagcaaggacagatttaaatgattctaactacagagaccaaatggactgggaattattttgcgaagttcttagaaatagagaaggtagacctttggaagaattgcttttgaatggtttaaggtttgacaaaatgagtttcagtcatttcaaaaatatcttacttactttcgcacaaatgaaccctaaaaaccctattcgtctcgggatggctaacgtagaattctccaccgagtgttttgattttctctttaattggatgtctgaatataacgttcaaggtgtggatttggcctataataatttagaaagtttggcaaaaagaatgatcaaaaaattggctaggcttccttataagcatttggaatattttacccttaacagcactaatatcacctctgttgatgatatgtcctacatattgaaatatctttctcgtttgccaagcataaaatttttggatttgagcaacttgcctcagttattcccggggattttaacatccggctataagtattttccccaatttccacaattgaaacgtattcattttgatttcgacgatctttctataaaagaaacaaccatgcttgtcagcatattagctaagtgtgaaaccctctctcatgtttctttgataggacaaagtcctatgcccgatgcaagtaaaatatccgacagtactgatgaacccgataagagtaaagatgaaaagaaagaacaaatcgtatttatgagaaatacgctttgggcctctttgtatgcatttgttagggactctcacaatttagttagtttagacgttgactatgatcaagtaccagacgaaattcaatctagaattgcgttatgcttaatgcataatatgaagagaattatggactctagctttaaattagatgaattgactgtacaagatgatttaatatttgatggttccttgataactgagacagcagaagaagttttgaaaagattaaatgacaaatctttacttcaaaatgatgttgggaagaaatatcttttaaagaaatattttgagaaaatggaaaaggtacatcataatgttcaaaatacaattgattctatgtttgagaaaagaaaatccggcgaattaccattacaggaaaaggaaaacttattgaggttattgcttcttgagaaaaatttatccaatattcttgatatttttgcttctatgcccaatatagcagatgtcgtaccattttccaaagccgataatagtttccctaatattggggatagcacggttagcgcaaactataatgatggtattcgtccatctttgaaacacttagattctgacaggttaatcaacgatgtttctattcctgaaaacgattcttccattagaccacacttaatggccaccgactctggaagaatcatcgatgtgaccactggtaaagctcttcttttcaagagttcttctaatacctccttggccggcaagagacaggaagaagaggaaggtgaattacataaatggggtgtgtttgtacagcaccaaagcagcagacataactctgggcttccttcttccgccaattcttctagaattagcgggtctttaacaccagatagcagtgtcgccggaggaaagaaaggggaatcctctcgcacatctggtacaaggccaaaaatcttaccaaagattcctaccggtgccgaattaagggatgccattattaaagctaagggtattgattctgtagatgatttgattaaaaatgttacctctgaaaaggttggattggaatctttatatggagatgaattgaactctagaagcccgagtaatgacagtttacaagaatctcaacaaaaggcgcctttgcagaggccccttgttgaagatgaaacagtgacaaaaaaatatgacaaacttttgaacgatttatctaatgttcgtcacagtaaaacctga

SEQ ID NO: 10565 - DNA, 909 bp, Saccharomyces cerevisiae
atgataaagttgcatgaagtgcctccagaaccagtagaccctgctagtctccctcatgatgttaatgcacatagccccgaaggagatggtaatcctgataagaggaaaaaaatatttggcattccgtatcctttttccaggagttcatgtcggagattcctttggaactgtcaaaagatttcggtactgcccatggcattgtatttcccactacatgcagcaaatacattaatcacgccggcagtatcacctgattctgctcctgacgacgttttaatgatggtgagagagattttaccgtccataactaccaagctgttagttgcgggtattactcttcatgtttctgctggtgtcttgctccgaatcgtgaacaactggaacaagccaagaagaaatagacatcgacatttaaagatatcggccgaacaagatctatcccaagattcgattggtttaactggtggaatttctggctatttatttggattgtataagaccttccgcattcctccacaagtgattagtggatacatccttgttcccgtcctgatataccacttattaattatgaaatgggtgccgaattccatctctactgaggtggatttcgcctctataaagcaattactatctagcaagaacaggtggtggaaatggcttggaggcctggtgccgttagctattctcctcgagtcaggtgtatatcatataggttcggggctctgccgttatttcggtgttagaaaaatgactagcaggaaaaaatggtccacagctatcaatctattaacactcgttgggttcgtttctctgattagattgatgaaagaggattctacgaaactgggtcccaaccaattcgaaagcattttcaaaaagatccggttgctgttgcacgtgaattag

SEQ ID NO: 10566 - DNA, 909 bp, Artificial Sequence
  Description of Artificial Sequence: Synthetic polynucleotide
atgataaagttgcatgaagtgcctccagaaccagtagaccctgctagtctccctcatgatgttaatgcacatagccccgaaggagatggtaatcctgataagaggaaaaaaatatttggcattccgtatcctttttccaggagtagttgtagaagattcctttggaactgtcaaaagattagtgtattgcccatggcattgtatttcccattgcatgcagcaaatacattaatcacgccggcagtatctcctgattctgctcctgacgacgttttaatgatggtgagagagattttaccgtccataactaccaagcttttagttgcgggtattactcttcatgtttctgctggtgtcttgctcagaatcgtgaacaactggaacaagccaagaagaaatagacatcgtcatttaaagatatctgccgaacaagatttatcccaagattctattggtttaactggtggaatttctggctatttatttggattgtataagaccttccgcattcctccacaagtgattagtggatacatccttgttcccgtcttgatataccacttattaattatgaaatgggtgccgaattccatctctactgaggtggatttcgcctctataaagcaattattatctagcaagaacaggtggtggaaatggcttggaggcttggtgccgttagctattctcctcgagtctggtgtatatcatataggttctgggctctgccgttatttcggtgttagaaaaatgactagcaggaaaaaatggtccacagctatcaatttattaacactcgttgggttcgtttctttgattagattgatgaaagaggattctacgaaattgggtcccaaccaattcgaaagcattttcaaaaagatcaggttgttgttgcacgtgaattga

SEQ ID NO: 10567 - DNA, 1404 bp, Saccharomyces cerevisiae
atggcgaaaagcaaatccagtcagggtgcgagtggagcacgccgtaaaccggcaccttctttataccaacacatttctagctttaaaccacaattcagcacaagagtcgacgatgttttacattttagcaagacactgacatggagaagtgagattattccagacaaatccaagggcaccttgacgactagtcttttatattctcaaggtagtgatatttacgaaatagacactactttaccattaaagacattctatgacgacgacgacgacgacgacaacgacgacgacgacgaagaaggtaacggcaagacgaagtctgcagccaccccaaatccagagtatggtgatgctttccaagatgttgaggggaaaccattgcgcccaaagtggatttaccagggcgaaacagtggcaaaaatgcaatacttggaaagctcagacgacagtacggcgatcgcgatgtccaagaacggctctttggcatggttcagagatgagatcaaggttcccgttcatatcgtacaggaaatgatgggccctgctactagatactctagtattcactctctaaccagaccaggttcattagcagtgtcagattttgatgtgtcgacaaatatggatacggtagtaaagtcacaaagtaacggctacgaggaggacagcatcttgaaaatcatcgacaactccgatagaccgggagatatattacgtacagtgcacgttccagggaccaacgtggctcactcagttagattttttaacaaccatttatttgcatcttgttcagatgacaacattttaagattctgggacacaagaacagcggacaaaccgctttggacgctaagcgaaccgaaaaatggacgactaacgtccttcgattcctctcaagttactgaaaacctatttgtcactgggttcagcacgggtgtcatcaagctatgggatgcgcgtgctgtgcaactggctactactgacctcacacataggcagaacggcgaggaaccgatccaaaacgaaatagccaagttgttccattctggcggcgattccgttgtcgatatcctgttctcacaaacctctgcaacagaatttgttacggttggaggaacgggtaatgtctaccactgggacatggagtactctttttcaagaaacgacgatgacaacgaagacgaagttcgagtggctgctccggaggaacttcagggtcaatgtttaaaatttttccacacaggtggcacaagaagatcgagcaaccaattcgggaagaggaacactgtggcgctacaccccgtaatcaatgattttgttggcactgttgattcagatagtcttgttactgcctacaaaccatttctggccagtgacttcattggcagaggttacgacgattaa

SEQ ID NO: 10568 - DNA, 1404 bp, Artificial Sequence
  Description of Artificial Sequence: Synthetic polynucleotide
atggcgaaaagcaaatccagtcagggtgcgagtggagcacgccgtaaaccggcaccttctttataccaacacatttctagctttaaaccacaattcagcacaagagtcgacgatgttttacattttagcaagacattaacatggagaagtgagattattccagacaaatccaagggcaccttgacgactagtcttttatattctcaaggtagtgatatttacgaaatagacactactttaccattaaagacattctatgacgacgacgacgacgacgacaacgacgacgacgacgaagaaggtaacggcaagacgaagtctgcagccaccccaaatccagagtatggtgatgctttccaagatgttgaggggaaaccattgcgcccaaagtggatttaccagggcgaaacagtggcaaaaatgcaatacttggaaagcagtgacgacagtacggcgatcgcgatgtccaagaacggctctttggcatggttcagagatgagatcaaggttcccgttcatatcgtacaggaaatgatgggccctgctactagatactctagtattcactctttaaccagaccaggttctttagcagtgtctgattttgatgtgtctacaaatatggatacggtagtaaagtctcaaagtaacggctacgaggaggacagcatcttgaaaatcatcgacaactccgatagaccgggagatatattacgtacagtgcacgttccagggaccaacgtggctcactctgttagattttttaacaaccatttatttgcatcttgttctgatgacaacattttaagattctgggacacaagaacagcggacaaaccgctttggacgttgagcgaaccgaaaaatggaagattgacgtccttcgattcctctcaagttactgaaaacttgtttgtcactgggttcagcacgggtgtcatcaagttatgggatgcgcgtgctgtgcaattggctactactgacctcacacataggcagaacggcgaggaaccgatccaaaacgaaatagccaagttgttccattctggcggcgattccgttgtcgatatcttattctctcaaacctctgcaacagaatttgttacggttggaggaacgggtaatgtctaccactgggacatggagtactctttttccagaaacgacgatgacaacgaagacgaagttagagtggctgctccggaggaacttcagggtcaatgtttaaaatttttccacacaggtggcacaagaagaagcagcaaccaattcgggaagaggaacactgtggcgttgcaccccgtaatcaatgattttgttggcactgttgattctgatagtcttgttactgcctacaaaccatttttggccagtgacttcattggcagaggttacgacgattga

SEQ ID NO: 10569 - DNA, 1314 bp, Saccharomyces cerevisiae
atgccaaaaaaggtttggaaatcatctacgccttccacttatgaacatatctccagcttaagaccaaaatttgtgtctcgtgtggacaatgttctgcaccaaaggaagtccttgacgttcagcaacgttgttgttccagataaaaaaaataacactctaacctcaagtgttatatactctcaaggtagtgatatctacgaaattgacttcgctgtaccactacaagaagccgcttcagaaccggtgaaagactatggtgacgcctttgaaggtattgaaaacacctcgttgagcccaaaattcgtgtaccagggtgaaactgtctccaaaatggcctacttagataagactggagaaactacattattgtcgatgtctaagaacgggtcgttggcttggttcaaagagggtataaaggtccctattcacattgtacaggaattgatgggtccagcaaccagctatgccagcatccattctttaaccagacctggtgatctacctgaaaaggatttctcattagccatctctgacttcggcatttccaatgataccgaaaccattgtgaagtctcagagtaatggtgatgaagaagacagtattttgaaaatcattgacaatgccggtaagcctggtgagattctacgtactgttcatgtgcctggtaccactgtgactcacaccgtaagatttttcgacaatcatatctttgcgtcttgttcagatgacaatattctgaggttctgggacactagaacttccgacaagcctatatgggtgttgggagaaccaaagaacggaaaattgacctcgtttgattgctctcaggtttccaacaacttgtttgttaccggtttcagtacgggtattatcaagttatgggatgccagagcggctgaagctgccaccactgatttgacttatagacaaaacggtgaagatccaattcagaatgaaatcgctaacttctatcatgccggcggtgattctgttgtcgacgtccaattttctgccacttcaagctctgaattctttactgtgggcggcactggtaatatttaccactggaacactgactattccttgtcaaagtacaatcctgacgataccattgctcctcctcaagatgccactgaagaatcacaaacaaaatctctgagattcttgcacaagggtggaagcagaagatctccaaaacagattggaagaagaaacaccgccgcttggcatccagttattgaaaacttggttggtactgtcgatgacgatagtttagtcagcatctacaagccctataccgaggaaagcgaatag

SEQ ID NO: 10570 - DNA, 1314 bp, Artificial Sequence
  Description of Artificial Sequence: Synthetic polynucleotide
atgccaaaaaaggtttggaaatcttctacgccttccacttatgaacatatctccagcttaagaccaaaatttgtgtctcgtgtggacaatgttttgcaccaaaggaagtccttgacgttcagcaacgttgttgttccagataaaaaaaataacactttgacctctagtgttatatactctcaaggtagtgatatctacgaaattgacttcgctgtaccattgcaagaagccgcttctgaaccggtgaaagactatggtgacgcctttgaaggtattgaaaacacctctttgagcccaaaattcgtgtaccagggtgaaactgtctccaaaatggcctacttagataagactggagaaactacattattgtccatgtctaagaacgggtctttggcttggttcaaagagggtataaaggtccctattcacattgtacaggaattgatgggtccagcaaccagctatgccagcatccattctttaaccagacctggtgatttacctgaaaaggatttctctttagccatctctgacttcggcatttccaatgataccgaaaccattgtgaagtctcagagtaatggtgatgaagaagacagtattttgaaaatcattgacaatgccggtaagcctggtgagattttgcgtactgttcatgtgcctggtaccactgtgactcacaccgtaagatttttcgacaatcatatctttgcgtcttgttctgatgacaatattttaaggttctgggacactagaacttccgacaagcctatatgggtgttgggagaaccaaagaacggaaaattgacctcttttgattgctctcaggtttccaacaacttgtttgttaccggtttcagtacgggtattatcaagttatgggatgccagagcggctgaagctgccaccactgatttgacttatagacaaaacggtgaagatccaattcagaatgaaatcgctaacttctatcatgccggcggtgattctgttgtcgacgtccaattttctgccacttccagctctgaattctttactgtgggcggcactggtaatatttaccactggaacactgactattccttgtccaagtacaatcctgacgataccattgctcctcctcaagatgccactgaagaatctcaaacaaaatctttgagattcttgcacaagggtggaagcagaagatctccaaaacagattggaagaagaaacaccgccgcttggcatccagttattgaaaacttggttggtactgtcgatgacgatagtttagtcagcatctacaagccctataccgaggaaagcgaatga

SEQ ID NO: 10571 - DNA, 1527 bp, Saccharomyces cerevisiae
atggcttcactgttcagacccccagaatctgcgaaatgcaacccaaactctcctagacttaaactgcccctcttacgaaataatcaggtagatgaaaataatatatacttgacgtcgaatgggagttccaccacagcttacagtagccacaccccagaaccactgacctcttccacatcgacacttttctcccaaactcgacttcatcctagcgactcttcaatgactttaaatacaatgaagaagaggcctgcaccgccatctttaccttcgctcagcataaattcacagtctaagtgcaaaacactacccgaactcgtacccatcgccgatgtgtctgatggtaaacatgatttaggattgaaacagcgtgtgatagccgaaaatgagttgtctggtaatagtgacttaaccccttcatcgatggcaagccccttttcacatacaaacacctcttctccctacctcagaaatgatctgagcaattcagtgggatctgacttttcaaatttgatatcggcatatgaacaaagttcaagtcccatcaagtcatcgtcccagcctaaatcatcttctgaatcgtacatagacttaaacagtgtacgagatgttgatcaattggatgaaaatggttggaaatatgcaaatttaaaagataggatcgagacattaggcattctaggagaaggagccggtggctctgtttccaagtgtaaattgaaaaatggatcaaaaatattcgctttaaaagtgataaacacattaaatacagatcccgagtatcagaagcaaatattcagagaattacagtttaataggagtttccaatccgaatatatcgtacgatattatggaatgtttacggatgacgaaaactcttcaatttatattgctatggagtacatgggtgggcgatcgttggatgctatttataaaaatttgttagagcgtggtggtaggatcagtgaaaaagtcctggggaagattgcagaagcggtactaagaggactatcatatttgcatgaaaaaaaagttattcatagagatattaagccccagaatattttactgaatgaaaatggtcaggtgaaactttgtgattttggggtcagtggagaagccgttaactcgctagccacaacattcacggggacgtcattctatatggctccagaaaggattcaaggtcaaccatacagtgtcacatctgatgtatggtcacttggattaacgattttggaagtggcgaacgggaaatttccatgctcttccgagaagatggcagccaatatagctccctttgaattgttaatgtggattttaacatttactcctgaattaaaggatgaacccgaatctaatatcatatggagtccatcattcaaatcctttatcgactactgtctgaaaaaagatagtcgtgaacggccatctccaagacaaatgatcaatcatccttggataaagggtcaaatgaaaaaaaatgtcaatatggaaaaattcgtgaggaagtgctggaaagattaa

SEQ ID NO: 10572 - DNA, 1527 bp, Artificial Sequence
  Description of Artificial Sequence: Synthetic polynucleotide
atggcttctttattcagacccccagaatctgcgaaatgcaacccaaactctcctagacttaaattgcccctcttaagaaataatcaggtagatgaaaataatatatacttgacgtccaatgggagttccaccacagcttacagtagccacaccccagaaccattgacctcttccacatctacacttttctcccaaactaggcttcatcctagcgactcttctatgactttaaatacaatgaagaagaggcctgcaccgccatctttaccttctctcagcataaattctcagtctaagtgcaaaacattacccgaactcgtacccatcgccgatgtgtctgatggtaaacatgatttaggattgaaacagcgtgtgatagccgaaaatgagttgtctggtaatagtgacttaaccccttcttctatggcaagccccttttctcatacaaacacctcttctccctacctcagaaatgatttgagcaattctgtgggatctgacttttctaatttgatatctgcatatgaacaaagtagtagtcccatcaagtcttcttcccagcctaaatcttcttctgaatcttacatagacttaaacagtgtaagagatgttgatcaattggatgaaaatggttggaaatatgcaaatttaaaagataggatcgagacattaggcattttaggagaaggagccggtggctctgtttccaagtgtaaattgaaaaatggatctaaaatattcgctttaaaagtgataaacacattaaatacagatcccgagtatcagaagcaaatattcagagaattacagtttaataggagtttccaatccgaatatatcgtaagatattatggaatgtttacggatgacgaaaactcttccatttatattgctatggagtacatgggtgggcgttctttggatgctatttataaaaatttgttagagcgtggtggtaggatcagtgaaaaagtccttgggaagattgcagaagcggtattaagaggattatcttatttgcatgaaaaaaaagttattcatagagatattaagccccagaatattttattgaatgaaaatggtcaggtgaaactttgtgattttggggtcagtggagaagccgttaactctttggccacaacattcacggggacgtccttctatatggctccagaaaggattcaaggtcaaccatacagtgtcacatctgatgtatggagtcttggattaacgattttggaagtggcgaacgggaaatttccatgctcttccgagaagatggcagccaatatagctccctttgaattgttaatgtggattttaacatttactcctgaattaaaggatgaacccgaatctaatatcatatggagtccatctttcaaatcctttatcgactactgtttgaaaaaagatagtcgtgaaagaccatctccaagacaaatgatcaatcatccttggataaagggtcaaatgaaaaaaaatgtcaatatggaaaaattcgtgaggaagtgctggaaagattga

SEQ ID NO: 10573 - DNA, 687 bp, Saccharomyces cerevisiae
atgagagctttttcagcagccaccgttagggccacaactaggaagtcgttcatcccaatggcaccaagaactccttttgtgactccatcatttacaaagaatgtaggctcaatgagaagaatgagattttattctgatgaagccaaaagtgaagaatccaaagaaaacaatgaagatttgactgaagagcaatcagaaatcaagaaattagagagccagttaagcgcgaagactaaagaagcttctgaactcaaggacagattattaagatctgtggcagatttcagaaatttacaacaagtcacaaagaaggatattcagaaagctaaggactttgctttacagaagtttgcaaaggatttattggaatctgtagataactttggtcatgctttgaatgcttttaaagaggaagacttacaaaagtccaaggaaattagtgatttgtatacaggggttagaatgacaagagatgtttttgaaaacaccctaagaaagcacggtattgaaaaattagacccattgggagaaccatttgatccaaataaacacgaagcaacgttcgagttgccacaacctgataaggaaccgggtactgttttccatgtacaacaattaggtttcaccttgaatgacagagttatcagaccagcaaaagtcggaattgttaagggcgaagagaactaa

SEQ ID NO: 10574 - DNA, 687 bp, Artificial Sequence
  Description of Artificial Sequence: Synthetic polynucleotide
atgagagctttttctgcagccaccgttagggccacaactaggaagagtttcatcccaatggcaccaagaactccttttgtgactccatcttttacaaagaatgtaggctctatgagaagaatgagattttattctgatgaagccaaaagtgaagaatccaaagaaaacaatgaagatttgactgaagagcaaagtgaaatcaagaaattagagagccagttaagcgcgaagactaaagaagcttctgaactcaaggacagattattaagatctgtggcagatttcagaaatttacaacaagtcacaaagaaggatattcagaaagctaaggactttgctttacagaagtttgcaaaggatttattggaatctgtagataactttggtcatgctttgaatgcttttaaagaggaagacttacaaaagtccaaggaaattagtgatttgtatacaggggttagaatgacaagagatgtttttgaaaacaccttgagaaagcacggtattgaaaaattagacccattgggagaaccatttgatccaaataaacacgaagcaacgttcgagttgccacaacctgataaggaaccgggtactgttttccatgtacaacaattaggtttcaccttgaatgacagagttatcagaccagcaaaagtcggaattgttaagggcgaagagaactga

SEQ ID NO: 10575 - DNA, 2403 bp, Saccharomyces cerevisiae
atggcttctgtacctaaacgccatacatacggtggcaacgttgtcactgatagggaccgtcattctcttcaaagaaacaatgagattttgcatcctatacataaaaatcagcgaaaacatgctaccttcggaccatacataatcggttccactttgggtgagggagaatttggtaaagttaagctgggttggaccaaggcttcctcctcgaacgaggttcctaagcaagtggcaatcaaattaattagaagagatacaatcaagaaagatgccgataaagaaattaaaatataccgcgaaattaacgcactgaagcatttaactcatcctaacattatctatttagaagaggtcctgcagaattcgaaatacattggaatagtgctagagtttgtatctgggggagaattctataagtatattcaacgtaagaggagattaaaggaatcttctgcatgcagattgtttgcccaattaattagtggggtcaattatatgcactacaaaggacttgttcatagggacttaaaactggaaaatttattattagataagcacgaaaatttagtcatcacggattttggttttgtgaatgaattttttgaagataacgaattaatgaaaacttcttgtggttcgccctgttatgcagcaccagaactagttgttagtaccaaggcatatgaagcaagaaaggcagatgtttggtcgtgtggtgttattctttatgcaatgctcgctggatatttgccgtgggatgacgatcatgaaaatccaacgggtgacgatattgctagactgtacaaatacatcacgcaaacacctcttaaatttcccgaatatataacccctattccaagagatttgctgaggcgaatactggtacccaatccaagaagaagaataaacttacaaacaataaaaaggcatgtgtggttgaagcctcatgaagcgtttttgagcattcagccgaactattgggatgaacacttacagaaggaacgtccgaaaccgccaaacaaaggtgacgttggtcgccactcaacttattcttcatcagcatcttcgtactcaaaaagtagggatagaaactctttaattatagagtcgactctagagcaacatcgaatgtctccacagcttgcgaccagcagaccagcatcaccaacattctctactggttccaaagtggtgttaaacgatacgaaaaatgacatgaaagaatctaatataaatggcgagcgtactagtgcatcatgcaggtacacacgtgattcgaagggcaacggccagacccaaatagaacaagtatcagctagacactcatccagaggcaataagcacacatcggtcgcgggactcgtaacaatccctggctcccccacaactgcaagaacaaggaatgcaccatcatcaaagcttactgagcatgtaaaagattctagtcagacaagctttactcaggaggaattccaccgtattggtaattatcacgtgcctcgcagtagacctaggccaacttcatattatcctggactcagtcgtaacaccgcggataatagtttagcggatattccagtaaataagttgggttcgaatggtaggttgacagatgccaaagacccggtaccgttgaacgcaatacacgataccaacaaagctacaatctccaacaattccattatgctattatcagaaggtccggctgcaaagacttccccagtagattaccattatgctattggcgacttaaaccatggtgacaaacccataactgaggttatcgacaaaattaataaggaccttactcataaagcagctgaaaatggttttcctcgagagagcatcgacccagagagtacctcaacgatattagttacgaaagaacccactaactccaccgatgaagatcatgtagaatctcagctggagaatgttggccactcttctaataaatcagacgcttcttctgataaagatagtaaaaagatctacgaaaaaaaaaggttcagcttcatgtcgttgtactcatccttaaatggttcaagatccactgttgaatctcgtacctcaaaagggaatgcacctcctgtttcatctagaaatccatcaggacaatcgaatagaagtaacattaaaataactcagcagcaaccacgtaacctttccgacagagttccaaatcccgataagaaaattaatgataatagaataagagacaacgcacctagctatgctgaaagcgagaatccgggaaggtctgtacgggcttctgttatggtgtcaacactacgagaagaaaatcgatcggaattgtcgaatgaagggaataatgtcgaggcacagacttcaacagcaagaaaggttctgaattttttcaaaagaaggagcatgagggtttga

SEQ ID NO: 10576 - DNA, 2403 bp, Artificial Sequence
  Description of Artificial Sequence: Synthetic polynucleotide
atggcttctgtacctaaacgccatacatacggtggcaacgttgtcactgatagggaccgtcattctcttcaaagaaacaatgagattttgcatcctatacataaaaatcagagaaaacatgctaccttcggaccatacataatcggttccactttgggtgagggagaatttggtaaagttaagttgggttggaccaaggcttcctccagtaacgaggttcctaagcaagtggcaatcaaattaattagaagagatacaatcaagaaagatgccgataaagaaattaaaatataccgcgaaattaacgcattgaagcatttaactcatcctaacattatctatttagaagaggtcttacagaattctaaatacattggaatagtgttggagtttgtatctgggggagaattctataagtatattcaacgtaagaggagattaaaggaatcttctgcatgcagattgtttgcccaattaattagtggggtcaattatatgcactacaaaggacttgttcatagggacttaaaattagaaaatttattattagataagcacgaaaatttagtcatcacggattttggttttgtgaatgaattttttgaagataacgaattaatgaaaacttcttgtggttctccctgttatgcagcaccagaattggttgttagtaccaaggcatatgaagcaagaaaggcagatgtttggtcttgtggtgttattctttatgcaatgctcgctggatatttgccgtgggatgacgatcatgaaaatccaacgggtgacgatattgctagattatacaaatacatcacgcaaacacctcttaaatttcccgaatatataacccctattccaagagatttgttgaggagaatattagtacccaatccaagaagaagaataaacttacaaacaataaaaaggcatgtgtggttgaagcctcatgaagcgtttttgagcattcagccgaactattgggatgaacacttacagaaggaacgtccgaaaccgccaaacaaaggtgacgttggtcgccacagtacttattcttcttctgcatcttcctactctaaaagtagggatagaaactctttaattatagagtctactttagagcaacatagaatgtctccacagcttgcgaccagcagaccagcatctccaacattctctactggttccaaagtggtgttaaacgatacgaaaaatgacatgaaagaatctaatataaatggcgagcgtactagtgcatcttgcaggtacacacgtgattctaagggcaacggccagacccaaatagaacaagtatccgctagacactcttccagaggcaataagcacacatctgtcgcgggactcgtaacaatccctggctcccccacaactgcaagaacaaggaatgcaccatcttccaagcttactgagcatgtaaaagattctagtcagacaagctttactcaggaggaattccaccgtattggtaattatcacgtgcctcgcagtagacctaggccaacttcttattatcctggactcagtcgtaacaccgcggataatagtttagcggatattccagtaaataagttgggtagtaatggtaggttgacagatgccaaagacccggtaccgttgaacgcaatacacgataccaacaaagctacaatctccaacaattccattatgcttttatctgaaggtccggctgcaaagacttccccagtagattaccattatgctattggcgacttaaaccatggtgacaaacccataactgaggttatcgacaaaattaataaggaccttactcataaagcagctgaaaatggttttcctcgtgagagcatcgacccagagagtacctctacgatattagttacgaaagaacccactaactccaccgatgaagatcatgtagaatctcagttggagaatgttggccactcttctaataaaagtgacgcttcttctgataaagatagtaaaaagatctacgaaaaaaaaaggttcagcttcatgtctttgtactcttccttaaatggttccagatccactgttgaatctcgtacctccaaagggaatgcacctcctgtttcttctagaaatccatctggacaaagcaatagaagtaacattaaaataactcagcagcaaccacgtaacctttccgacagagttccaaatcccgataagaaaattaatgataatagaataagagacaacgcacctagctatgctgaaagcgagaatccgggaaggtctgtaagagcttctgttatggtgtctacattgagagaagaaaatagaagtgaattgagcaatgaagggaataatgtcgaggcacagacttctacagcaagaaaggttttgaattttttcaaaagaaggagcatgagggtttga

SEQ ID NO: 10577 - DNA, 324 bp, Saccharomyces cerevisiae
atggctgaatcccatagactatacgttaaaggtaagcacttatcctaccaaagatctaagagagttaacaacccaaatgtctctttgattaagattgaaggtgttgccactccacaagaagctcaattctatttgggtaagcgtatcgcctacgtttacagagcttccaaggaagtcagaggttccaagattagagttatgtggggcaaagtcaccagaactcacggtaactctggtgtcgttagagctacctttagaaacaacttgccagccaagactttcggtgcctctgtcagaattttcttgtacccatctaacatttaa

SEQ ID NO: 10578 - DNA, 324 bp, Artificial Sequence
  Description of Artificial Sequence: Synthetic polynucleotide
atggctgaatcccatagattatacgttaaaggtaagcacttatcctaccaaagatctaagagagttaacaacccaaatgtctctttgattaagattgaaggtgttgccactccacaagaagctcaattctatttgggtaagcgtatcgcctacgtttacagagcttccaaggaagtcagaggttccaagattagagttatgtggggcaaagtcaccagaactcacggtaactctggtgtcgttagagctacctttagaaacaacttgccagccaagactttcggtgcctctgtcagaattttcttgtacccatctaacatttga

SEQ ID NO: 10579 - DNA, 315 bp, Saccharomyces cerevisiae
atgggtttatacaggccgtcaaaattttttcacccccccataccccacataccttttactattaaccctgattttttttcttttcacatacagcgccttaaggcgaaggcaaatcctgaaaattttctcatttgctttcccccaccagacatatataaaggctttgtattctgctgtcaattagatttagtacatcttttctcttatgttttcttcttgtttctacttaaaatctgtgtcgacgtacttcagtatgtaatataccccaaacattttacccacaaaaaaccaggatttgaaaactatagcatctaa

SEQ ID NO: 10580 - DNA, 315 bp, Artificial Sequence
  Description of Artificial Sequence: Synthetic polynucleotide
atgggtttatacaggccgtccaaattttttcacccccccataccccacataccttttactattaaccctgattttttttcttttcacatacagcgccttaaggcgaaggcaaatcctgaaaattttctcatttgctttcccccaccagacatatataaaggctttgtattctgctgtcaattagatttagtacatcttttctcttatgttttcttcttgtttttacttaaaatctgtgtcgacgtacttcagtatgtaatataccccaaacattttacccacaaaaaaccaggatttgaaaactatagcatctga

SEQ ID NO: 10581 - DNA, 636 bp, Saccharomyces cerevisiae
atggctggaggaaagattcctattgtaggaattgtggcatgtttacagccggagatggggataggatttcgtggaggtctaccatggaggttgcccagtgaaatgaagtatttcagacaggtcacttcattgacgaaagatccaaacaaaaaaaatgctttgataatgggaaggaagacatgggaatccataccgcccaagtttcgcccactgcccaatagaatgaatgtcattatatcgagaagcttcaaggacgattttgtccacgataaagagagatcaatagtccaaagtaattcattggcaaacgcaataatgaacctagaaagcaattttaaggagcatctggaaagaatctacgtgattgggggtggcgaagtttatagtcaaatcttctccattacagatcattggctcatcacgaaaataaatccattagataaaaacgcaactcctgcaatggacactttccttgatgcgaagaaattggaagaagtatttagcgagcaagatccggcccagctgaaagaatttcttccccctaaagtagagttgcccgaaacagactgtgatcaacgctactcgctggaagaaaaaggttattgcttcgaattcactctatacaatcgtaaatga

SEQ ID NO: 10582 - DNA, 636 bp, Artificial Sequence
  Description of Artificial Sequence: Synthetic polynucleotide
atggctggaggaaagattcctattgtaggaattgtggcatgtttacagccggagatggggataggatttcgtggaggtttgccatggaggttgcccagtgaaatgaagtatttcagacaggtcacttctttgacgaaagatccaaacaaaaaaaatgctttgataatgggaaggaagacatgggaatccataccgcccaagtttcgcccattgcccaatagaatgaatgtcattatatctagaagcttcaaggacgattttgtccacgataaagagagaagtatagtccaaagtaattctttggcaaacgcaataatgaacttggaaagcaattttaaggagcatttggaaagaatctacgtgattgggggtggcgaagtttatagtcaaatcttctccattacagatcattggctcatcacgaaaataaatccattagataaaaacgcaactcctgcaatggacactttccttgatgcgaagaaattggaagaagtatttagcgagcaagatccggcccagttgaaagaatttcttccccctaaagtagagttgcccgaaacagactgtgatcaacgctactctttggaagaaaaaggttattgcttcgaattcactttgtacaatcgtaaatga

SEQ ID NO: 10583 - DNA, 1305 bp, Saccharomyces cerevisiae
atgtctcaacacgcaagctcatcttcttggacttcttttttgaaatcgataagttcgttcaacggagatctatcgtctttgtctgcaccaccgtttattctttctcccacttccttaacagagttttctcagtattgggctgaacatccagctttatttctggagccttcgttgattgatggtgaaaactacaaagatcactgtccctttgacccaaatgtggaatcaaaggaagtggcgcagatgttggcggttgttaggtggtttatttctactttgagatctcaatactgctctagaagcgaatcgatgggttctgaaaagaagcctttgaacccattcttgggtgaggtatttgttggaaagtggaaaaatgatgagcatccagagtttggtgaaacggttcttttaagtgagcaagtttcacatcatccacctatgacagcattttcgatttttaatgaaaaaaatgatgtttctgttcaaggatacaatcaaattaaaactggttttaccaaaacattgacgctaacggtcaaaccatacgggcatgtcattttgaagattaaagatgagacctacctgattacaaccccgcctttgcatatcgaaggtattttagtcgcttctccatttgttgaattaggaggcaggtcattcatacagtcatcaaatggtatgttatgtgttatagaattttcaggaagggggtatttcacagggaagaagaactcctttaaggcaagaatttacagaagcccacaagagcatagtcataaagaaaatgcgctatacctaatctctggccaatggtcaggtgtttcaacaattataaaaaaagactcgcaagtttcacatcagttttacgattcatcggaaactcctactgaacatttattagttaagccaatcgaagaacaacatcctctggaaagtaggagggcatggaaggatgtggcagaagcaatcagacaaggaaatattagtatgataaaaaagactaaggaagaactagaaaataagcaaagagccttgagagaacaagaacgcgtaaaaggtgtggaatggcaaagaagatggttcaaacaagtggactacatgaatgaaaatacatcaaatgatgtagagaaagcaagtgaagatgatgcctttaggaaattggcgtccaaactgcagctttctgtgaaaaatgtgccaagtgggacattgattggcggcaaagatgataagaaagatgtttcaaccgcattgcattggaggtttgataaaaatttgtggatgagggagaacgaaattactatataa

SEQ ID NO: 10584 - DNA, 1305 bp, Artificial Sequence
  Description of Artificial Sequence: Synthetic polynucleotide
atgtctcaacacgcaagctcttcttcttggacttcttttttgaaatctataagttctttcaacggagatttatcttctttgtctgcaccaccgtttattctttctcccacttccttaacagagttttctcagtattgggctgaacatccagctttatttttggagccttctttgattgatggtgaaaactacaaagatcactgtccctttgacccaaatgtggaatccaaggaagtggcgcagatgttggcggttgttaggtggtttatttctactttgagatctcaatactgctctagaagcgaaagtatgggttctgaaaagaagcctttgaacccattcttgggtgaggtatttgttggaaagtggaaaaatgatgagcatccagagtttggtgaaacggttcttttaagtgagcaagtttctcatcatccacctatgacagcattttctatttttaatgaaaaaaatgatgtttctgttcaaggatacaatcaaattaaaactggttttaccaaaacattgacgttaacggtcaaaccatacgggcatgtcattttgaagattaaagatgagacctacttgattacaaccccgcctttgcatatcgaaggtattttagtcgcttctccatttgttgaattaggaggcaggtctttcatacagtcttccaatggtatgttatgtgttatagaattttctggaagggggtatttcacagggaagaagaactcctttaaggcaagaatttacagaagcccacaagagcatagtcataaagaaaatgcgttgtacttgatctctggccaatggtctggtgtttctacaattataaaaaaagactctcaagtttctcatcagttttacgattcttctgaaactcctactgaacatttattagttaagccaatcgaagaacaacatcctttggaaagtaggagggcatggaaggatgtggcagaagcaatcagacaaggaaatattagtatgataaaaaagactaaggaagaattggaaaataagcaaagagccttgagagaacaagaacgcgtaaaaggtgtggaatggcaaagaagatggttcaaacaagtggactacatgaatgaaaatacaagtaatgatgtagagaaagcaagtgaagatgatgcctttaggaaattggcgtccaaattacagctttctgtgaaaaatgtgccaagtgggacattgattggcggcaaagatgataagaaagatgtttctaccgcattgcattggaggtttgataaaaatttgtggatgagggagaacgaaattactatatga

SEQ ID NO: 10585 - DNA, 912 bp, Saccharomyces cerevisiae
atggacgaaaaagtcgaacttattttagtgccatgccactcaatatggaagtcctcatcgcatcctagtgataattcagttaatttgggtcaattacctgaatactggcatttagctccgtttcagtatgagggtaatgatcatttagcattcatcaaacatggcctaactgctattaaactactcctacaaagattcgacaccgctaccgttatcttcagtggatcccaaacgaaaaaagaggcaggcgctatatctgaggcacaaagctactattttttatttgaaaagttgattagatatgtgatgagcaatgataacatcgatgttccaaactttgataacgagctgcgtcttttattaaaagaggtcaaaaacttgctatcaagtcaaaatgtaaatgttgatgaattgttctatggtggttcaatcactactgaagagttctcgctggactcatttgataatttaatttattctatatatagatttgaggaagtgaataaaaaattcccacagaaaataactataatagggtttgcgtttaagatgccaagattcatcagctgtcatgccaaggccattgattacccacaatcaaacataacctacataggaattgaccctaaaccagcaaactacaaccaaacacaactttcaaaatactatgatgatctagtacaaatggaagataaaaatgcactaagcttattttcttcagattggtacgctacaaaggatagattactcaccaagaaaagatctcgcaacccatttaacagaactgcaccgtacgctcagaatattttctgcaaagaaaacggcaagaggatcgagggaatcgaggatgacgaggaatattttgaaacaaaaattaagtgtaaaatgccatggtcgtcgccaagacaataa

SEQ ID NO: 10586 - DNA, 912 bp, Artificial Sequence
  Description of Artificial Sequence: Synthetic polynucleotide
atggacgaaaaagtcgaacttattttagtgccatgccactccatatggaagtcctcttctcatcctagtgataattctgttaatttgggtcaattacctgaatactggcatttagctccgtttcagtatgagggtaatgatcatttagcattcatcaaacatggcttaactgctattaaattactcttacaaagattcgacaccgctaccgttatcttcagtggatcccaaacgaaaaaagaggcaggcgctatatctgaggcacaaagctactattttttatttgaaaagttgattagatatgtgatgagcaatgataacatcgatgttccaaactttgataacgagttgcgtcttttattaaaagaggtcaaaaacttgttatccagtcaaaatgtaaatgttgatgaattgttctatggtggttctatcactactgaagagttctccttggactcttttgataatttaatttattctatatatagatttgaggaagtgaataaaaaattcccacagaaaataactataatagggtttgcgtttaagatgccaagattcatcagctgtcatgccaaggccattgattacccacaaagtaacataacctacataggaattgaccctaaaccagcaaactacaaccaaacacaactttctaaatactatgatgatttagtacaaatggaagataaaaatgcattaagcttattttcttctgattggtacgctacaaaggatagattactcaccaagaaaagatctcgcaacccatttaacagaactgcaccgtacgctcagaatattttctgcaaagaaaacggcaagaggatcgagggaatcgaggatgacgaggaatattttgaaacaaaaattaagtgtaaaatgccatggtcctctccaagacaatga

SEQ ID NO: 10587 - DNA, 1887 bp, Saccharomyces cerevisiae
atgggtgtcgcagatttgatcaagaaattcgaaagcatctcaaaggaagaaggcgatgctaccgttgatacaaacagttcatcaaagcctctcaaatcaaacgatgaaaccaaagaattgcatcaacaagagtctactgctgttccgcaagaggttgacgtaaatgaagagtttgagaatgaaccagaaacaattaacagtagtagaactgctgagaaaccattggaaacaaacctcccaaaacctgaaactaacgaagaagacgaagaagagggctccatgagcgagaataaaatatattctaaaggtgaaaatgctgacatcaacgttaatgattttcaagaatataaagaaatggaaaatactggcgctgaagttcttgcaagtagtgttgaagaatccgatgctattcaagaaggtgtggctgaggaaactgaagggattgctactcctaaacaaaaagaaaacgaaaaaaatgatgaatcagaagaagaatctgcaaataatgcatctgaaccagccgaagaatattctcaatctgaagaagatgctgacatcgagcaatctaatggcaaagaaactgaaaatgccgaaaacgcttctcaacaagctaatgatggctctacaagtaccacgacttctaagaataagaagaaaaaaaacaaaaaaaaaaacaagaagaagagaaatggaaatgttaacaccaacgctaatgtcgacgacagcaccaaaaccggtgaaaatgatgatacaaccggcgacaccacgtcatcaacaacctccgccattcaagaagtgaatgatttggaagttgttgatgactcttgtcttggcattgatcaacagcataatagggagcatttgaaagcgttaactcaggacgttaaagaagagacgttagagaatattgcgcacgagggcagaggtgataacacaggcgatcagaatgcagtagaaaaatctgatttcgaaaaatcagatacagaaggttcaagaataggccgcgacttaccctttgaatttggaaaacgtaacttgaccgaggaatctgacgtttgggatcataacgcttgggataatgttgagtggggtgaagaacaagtccagcaggcggaggaaaaaatcaaagagcagtttaagcatcctgtacctgagtttgacaaaaaactatacaatgaaaatccggcacgttattgggacattttttataaaaacaacaaggaaaactttttcaaggacagaaagtggttacaaattgaatttccaatcttatacgcatctaccagaaaagacgcagaacccgttacaatatttgaaattggctgtggggcaggtaacacttttttcccgatcttgaaagataatgagaacgaaaacttgaggataatagccgcagattttgctccaagagccgtcgaattagttaaaaattctgaacagttcaaccccaagtacggccacgcaacagtatgggatttggccaatcctgacggtaatttacctgatggcgtcgaacctcattctgtggatattgcagtaatgatcttcgtttttagtgctttagcaccaaaccaatgggatcaagccatggataaccttcacaaaattttgaaaccaggcggtaagatcatatttcgtgattacggtgcatatgatttaactcaagttagattcaaaaagaacagaatcctagaagagaacttctacgttagaggtgatggtacaagagtttattttttctctgaagaaaaactaagagaaattttcacgaaaaagtacttcttggaaaataaaattggaactgatagaaggttgttggttaacagaaaaaggcaactaaaaatgtaccgctgctgggtacaagctgtgtttgacgttcctcaatag

SEQ ID NO: 10588 - DNA, 1887 bp, Artificial Sequence
  Description of Artificial Sequence: Synthetic polynucleotide
atgggtgtcgcagatttgatcaagaaattcgaaagcatctccaaggaagaaggcgatgctaccgttgatacaaacagttcttccaagcctctcaaaagtaacgatgaaaccaaagaattgcatcaacaagagtctactgctgttccgcaagaggttgacgtaaatgaagagtttgagaatgaaccagaaacaattaacagtagtagaactgctgagaaaccattggaaacaaacctcccaaaacctgaaactaacgaagaagacgaagaagagggctccatgagcgagaataaaatatattctaaaggtgaaaatgctgacatcaacgttaatgattttcaagaatataaagaaatggaaaatactggcgctgaagttcttgcaagtagtgttgaagaatccgatgctattcaagaaggtgtggctgaggaaactgaagggattgctactcctaaacaaaaagaaaacgaaaaaaatgatgaaagtgaagaagaatctgcaaataatgcatctgaaccagccgaagaatattctcaatctgaagaagatgctgacatcgagcaatctaatggcaaagaaactgaaaatgccgaaaacgcttctcaacaagctaatgatggctctacaagtaccacgacttctaagaataagaagaaaaaaaacaaaaaaaaaaacaagaagaagagaaatggaaatgttaacaccaacgctaatgtcgacgacagcaccaaaaccggtgaaaatgatgatacaaccggcgacaccacgtcttctacaacctccgccattcaagaagtgaatgatttggaagttgttgatgactcttgtcttggcattgatcaacagcataatagggagcatttgaaagcgttaactcaggacgttaaagaagagacgttagagaatattgcgcacgagggcagaggtgataacacaggcgatcagaatgcagtagaaaaatctgatttcgaaaaatctgatacagaaggttccagaataggccgcgacttaccctttgaatttggaaaacgtaacttgaccgaggaatctgacgtttgggatcataacgcttgggataatgttgagtggggtgaagaacaagtccagcaggcggaggaaaaaatcaaagagcagtttaagcatcctgtacctgagtttgacaaaaaactttacaatgaaaatccggcacgttattgggacattttttataaaaacaacaaggaaaactttttcaaggacagaaagtggttacaaattgaatttccaatcttatacgcatctaccagaaaagacgcagaacccgttacaatatttgaaattggctgtggggcaggtaacacttttttcccgatcttgaaagataatgagaacgaaaacttgaggataatagccgcagattttgctccaagagccgtcgaattagttaaaaattctgaacagttcaaccccaagtacggccacgcaacagtatgggatttggccaatcctgacggtaatttacctgatggcgtcgaacctcattctgtggatattgcagtaatgatcttcgtttttagtgctttagcaccaaaccaatgggatcaagccatggataaccttcacaaaattttgaaaccaggcggtaagatcatatttcgtgattacggtgcatatgatttaactcaagttagattcaaaaagaacagaatcttggaagagaacttctacgttagaggtgatggtacaagagtttattttttctctgaagaaaaattgagagaaattttcacgaaaaagtacttcttggaaaataaaattggaactgatagaaggttgttggttaacagaaaaaggcaattgaaaatgtaccgctgctgggtacaagctgtgtttgacgttcctcaatga

SEQ ID NO: 10589 - DNA, 1647 bp, Saccharomyces cerevisiae
atgcataaaggaaaaaaaaattaccctaatttgattacttcgtttcggatgaatttgaaaaaaatcatattgaaccatgaccgatttagccatccagaaagatggaaaacaaacgcactcttaaggttcaccttcgtgtatataaaatttctcttcgacttgatgataatcaaaaatccattaaggatggttggaaaaacttatcgagacgctgttactgcgctaaactctttgcagtccaattatgccaacatcatggctatccgtcaaactggtgatcgtaaaaacactatgacattattggaaatgcatgaatggtctcgaagaattggttactctgcatcggatttcaataaattaaatattgttcatatcactggaacaaaaggtaaaggttctactgccgcatttacttcatcaattctaggacaatataaagaacaattaccacgtatcgggctatatacgtctccacatcttaagtcagtgagagaaagaataagaataaatggggagccaatttctgaagaaaaatttgcgaagtacttctttgaggtttgggaccgtctagatagtacaacctcttctttggataaattcccgcacatgatcccgggaagtaagcctggctatttcaagttcctcacattgctttcatttcacacttttatacaagaggactgcaaaagctgtgtctacgaagtcggcgtcggaggtgaattggatagcactaatataattgaaaagccaattgtctgcggtgttacactattaggaatagaccatactttcatgcttggtgatactattgaagaaattgcttggaataagggaggaattttcaaatctggagcaccagcattcaccgttgagaaacaacctcctcagggattaacaatattgaaagaaagagctgaggagcgcaaaacaacgctaacagaagtacccccatttaaacagttggaaaatgtcaagcttggaattgctggcgagtttcaaaaaagtaacgcctcccttgccgttatgctggcttctgagatcttgcatacgtccaatatattggaggagaagatcaaatgcagttcgaatgcatcgattccagaaaaattcataatcggtctacaaaatactaagtgggaaggcagatgtcaagtactagaaaagggaaaaaacgtttggtacattgatggtgctcacaccaaagatagtatggtagctgcatcaacatggttcagagatatggttcgattgtcgaagagaaagaagatcttgctcttcaaccaacaaagcagagatgccaacgctcttgtgaataacctgtactcatctgtttcgccagaaataacgttcgatgatgtgatatttactactaatgtcacttggaaatcaggctcatacagcgctgacctcgtttccatgaacacttctcaagaagatgtagaaaaattgaaagtccaggagtcattagtcaagaattggaacaaaatagacgataatcgtgctaaaacgcatgtaacggctagtatagaggaagcaaatgaattgattgaaacgctatacgatgaacctgctgatatatttgtaactggttcattacatcttgttggcggattattggtcgtttttgatagaatagatgtaaagtaa

SEQ ID NO: 10590 - DNA, 1647 bp, Artificial Sequence
  Description of Artificial Sequence: Synthetic polynucleotide
atgcataaaggaaaaaaaaattaccctaatttgattacttcttttagaatgaatttgaaaaaaatcatattgaaccatgacagatttagccatccagaaagatggaaaacaaacgcactcttaaggttcaccttcgtgtatataaaatttctcttcgacttgatgataatcaaaaatccattaaggatggttggaaaaacttatagagacgctgttactgcgttgaactctttgcagtccaattatgccaacatcatggctatccgtcaaactggtgatcgtaaaaacactatgacattattggaaatgcatgaatggtctagaagaattggttactctgcatctgatttcaataaattaaatattgttcatatcactggaacaaaaggtaaaggttctactgccgcatttacttcttccattttaggacaatataaagaacaattaccacgtatcgggttatatacgtctccacatcttaagtctgtgagagaaagaataagaataaatggggagccaatttctgaagaaaaatttgcgaagtacttctttgaggtttgggaccgtttggatagtacaacctcttctttggataaattcccgcacatgatcccgggaagtaagcctggctatttcaagttcctcacattgctttcttttcacacttttatacaagaggactgcaaaagctgtgtctacgaagtcggcgtcggaggtgaattggatagcactaatataattgaaaagccaattgtctgcggtgttacattattaggaatagaccatactttcatgcttggtgatactattgaagaaattgcttggaataagggaggaattttcaaatctggagcaccagcattcaccgttgagaaacaacctcctcagggattaacaatattgaaagaaagagctgaggagcgcaaaacaacgttgacagaagtacccccatttaaacagttggaaaatgtcaagcttggaattgctggcgagtttcaaaaaagtaacgcctcccttgccgttatgttggcttctgagatcttgcatacgtccaatatattggaggagaagatcaaatgcagtagtaatgcatctattccagaaaaattcataatcggtttacaaaatactaagtgggaaggcagatgtcaagtattggaaaagggaaaaaacgtttggtacattgatggtgctcacaccaaagatagtatggtagctgcaagcacatggttcagagatatggttagattgtccaagagaaagaagatcttgctcttcaaccaacaaagcagagatgccaacgctcttgtgaataacctttactcttctgtttctccagaaataacgttcgatgatgtgatatttactactaatgtcacttggaaatctggctcttacagcgctgacctcgtttccatgaacacttctcaagaagatgtagaaaaattgaaagtccaggagtctttagtcaagaattggaacaaaatagacgataatcgtgctaaaacgcatgtaacggctagtatagaggaagcaaatgaattgattgaaacgttgtacgatgaacctgctgatatatttgtaactggttctttacatcttgttggcggattattggtcgtttttgatagaatagatgtaaagtga

SEQ ID NO: 10591 - DNA, 1116 bp, Saccharomyces cerevisiae
atgtacaagaactattattcaaacacagaagtttataaaaagcataaagactctggaagtttgaggaagaaagctttgagatcgagaagatcatcttttttttcatttttcaatgactcgtctagttcgaatggaaacgaattcataggttttagacgatttgcaaaagcatatctgtttggtcgtgagataggttcatgtggtacagattcatatacaccagttggggcaaatgtaaacaaaagacgtttaaaaaaagaagataaaaacgatcaacagctttggaaaaggcagcaccattcacagggttgtttttttcccatagatgatgacagtaataagcaaacagaagcagccgtcaacaaattttatgagaatggagaatacgttaatcaggatttaattttcaagggaaaagtatattcagaagaatcagaggttgttgatgagaaaacggcaggttctcagaatcccgctcttctcaaaacaagatcaatttcattaaacgatataccgcgcggcacaggcatctctagtgtattgtctcaagtacgcggaggttccttagaaagaattattgtctataggtacgatactccggaacgttctttgcataaagttgatcttttcttcttaaattacgagggagctcaatcttttatgagatacgcaaaaacaaatatttttaaagttaatggagttcaattaaaaccagaatggatattcctcgagagcacatatgaaaacataatgaaagagcaatctgtcaacagaataatagaagaggaaaagttcatatcaagatgtttgatagtgaaaaaaagctcgacaacagcaatgcctaacaaatcaaatctgaataaagggcaaactttagaaaacattgatattcaagaattagaaaaagattttcagaattttggagaggttctagaaattacgcctattgtatcaagaaaattatgcgtatctatattcttttacgatatttccagtgctatgagagctatggaagaatacgaacaaaagggctcatatctatataataaatattttaaaacatggacaatatggtacgggaaagatattacagaccagccttgcattgacttgtag

SEQ ID NO: 10592 - DNA, 1116 bp, Artificial Sequence
  Description of Artificial Sequence: Synthetic polynucleotide
atgtacaagaactattattccaacacagaagtttataaaaagcataaagactctggaagtttgaggaagaaagctttgagatctagaagatcttcttttttttcttttttcaatgactcttctagtagtaatggaaacgaattcataggttttagaagatttgcaaaagcatatttatttggtcgtgagataggttcttgtggtacagattcttatacaccagttggggcaaatgtaaacaaaagacgtttaaaaaaagaagataaaaacgatcaacagctttggaaaaggcagcaccattctcagggttgtttttttcccatagatgatgacagtaataagcaaacagaagcagccgtcaacaaattttatgagaatggagaatacgttaatcaggatttaattttcaagggaaaagtatattctgaagaaagtgaggttgttgatgagaaaacggcaggttctcagaatcccgctcttctcaaaacaagatctatttctttaaacgatataccgcgcggcacaggcatctctagtgtattgtctcaagtacgcggaggttccttagaaagaattattgtctataggtacgatactccggaacgttctttgcataaagttgatcttttcttcttaaattacgagggagctcaatcttttatgagatacgcaaaaacaaatatttttaaagttaatggagttcaattaaaaccagaatggatattcctcgagagcacatatgaaaacataatgaaagagcaatctgtcaacagaataatagaagaggaaaagttcatatctagatgtttgatagtgaaaaaaagctctacaacagcaatgcctaacaaatctaatttgaataaagggcaaactttagaaaacattgatattcaagaattagaaaaagattttcagaattttggagaggttttggaaattacgcctattgtatctagaaaattatgcgtatctatattcttttacgatatttccagtgctatgagagctatggaagaatacgaacaaaagggctcctatttgtataataaatattttaaaacatggacaatatggtacgggaaagatattacagaccagccttgcattgacttgtga

SEQ ID NO: 10593 - DNA, 2031 bp, Saccharomyces cerevisiae
atgtctgactcctcagaagccactgtaaagagaccccttgatgctcacgtaggaccttccgaaaatgctgcaaagaagttgaaaattgagcaacgtactcaggcagatggtattcacgaagcagatgtcggtattactttgttcttatctccagaattgccaggatttagaggccaaattaagcagcgttatactgactttttggtcaacgaaatagatcaagaaggtaaggtcattcacttaactgataaaggatttaaaatgccaaagaaaccacaacgctctaaagaagaggtcaatgcagaaaaggagtctgaagcagctagaagacaagaattcaacgtcgaccccgaattaagaaatcaattggtggagatatttggtgaggaagatgtattgaaaatagaatccgtttatcgcacggctaataaaatggaaacggcaaaaaatttcgaagataaatctgttagaactaaaattcaccaactgttacgtgaggcatttaaaaatgaattagaatctgtgactactgatactaacacttttaagattgcaagatcaaatagaaattcaagaaccaataaacaagagaaaattaaccaaaccagggacgctaacggtgtagaaaattggggatatggtcccagtaaagattttattcacttcactctacataaagaaaataaggatactatggaagctgtcaatgttataacaaagttgttaagagttccaagccgtgtaattagatatgcaggtactaaggatcgtagagcagtaacgtgccaaagggtttcgatttcaaagattggtttggatagactaaatgctttaaataggactttaaaaggaatgattatcggaaattacaatttttcggatgcaagtttgaatctgggagacttgaagggaaatgagttcgttgttgttattagagatgttaccaccggcaatagtgaggtatcactggaagaaattgtgtctaacggctgtaagtctttatcagaaaatgggtttatcaattattttggtatgcagagattcggtacattcagtatttctacgcacacaattggtagagaattgctcctttcaaactggaagaaggctgctgagttgattttatctgaccaggataacgtgcttcctaaatctaaggaagctaggaagatttgggcagaaactaaggacgcggctttagcattgaagcagatgccaagacagtgtctcgcagaaaatgcgttactatattctttatctaatcaaagaaaagaagaagatggaacttattctgagaacgcttattatactgctattatgaaaattcccagaaatttgagaactatgtatgtacatgcctaccaaagttacgtctggaattctattgctagtaagcggatagaactacatggtttgaagttagttgtaggtgaccttgtcattgatactagtgaaaagtcaccactaatttctgggattgacgatgaagactttgatgaagatgtccgtgaagctcagttcattcgtgcaaaagcagtaactcaagaggatatcgactcagttaagtataccatggaagatgtcgtgttaccatcgccgggttttgatgtgctttatccttccaacgaagaattgaagcaactgtatgtggatatattgaaagcagataatatggacccatttaatatgagaagaaaagttcgcgatttttcattggctggctcttatagaactgttattcaaaagccaaagagtttagagtatagaataattcactatgatgatccttctcaacaattggtgaacactgatttggacatcctgaataacaccagagcaaaagaaagcggccagaagtatatgaaagccaagttggacagatatatgccagataaaggcggtgagaagactgcggtggtgttaaaatttcaattaggaacctccgcatatgccaccatggcattacgtgaactcatgaagcttgagacttctcgccgtggcgacatgtgtgatgttaaggagaatatctaa

SEQ ID NO: 10594 - DNA, 2031 bp, Artificial Sequence
  Description of Artificial Sequence: Synthetic polynucleotide
atgtctgactccagtgaagccactgtaaagagaccccttgatgctcacgtaggaccttccgaaaatgctgcaaagaagttgaaaattgagcaacgtactcaggcagatggtattcacgaagcagatgtcggtattactttgttcttatctccagaattgccaggatttagaggccaaattaagcagcgttatactgactttttggtcaacgaaatagatcaagaaggtaaggtcattcacttaactgataaaggatttaaaatgccaaagaaaccacaacgctctaaagaagaggtcaatgcagaaaaggagtctgaagcagctagaagacaagaattcaacgtcgaccccgaattaagaaatcaattggtggagatatttggtgaggaagatgtattgaaaatagaatccgtttatcgcacggctaataaaatggaaacggcaaaaaatttcgaagataaatctgttagaactaaaattcaccaattattacgtgaggcatttaaaaatgaattagaatctgtgactactgatactaacacttttaagattgcaagatctaatagaaattctagaaccaataaacaagagaaaattaaccaaaccagggacgctaacggtgtagaaaattggggatatggtcccagtaaagattttattcacttcactttacataaagaaaataaggatactatggaagctgtcaatgttataacaaagttgttaagagttccaagccgtgtaattagatatgcaggtactaaggatcgtagagcagtaacgtgccaaagggtttctatttccaagattggtttggatagattgaatgctttaaataggactttaaaaggaatgattatcggaaattacaatttttctgatgcaagtttgaatttaggagacttgaagggaaatgagttcgttgttgttattagagatgttaccaccggcaatagtgaggtatctttggaagaaattgtgtctaacggctgtaagtctttatctgaaaatgggtttatcaattattttggtatgcagagattcggtacattcagtatttctacgcacacaattggtagagaattgctcctttccaactggaagaaggctgctgagttgattttatctgaccaggataacgtgcttcctaaatctaaggaagctaggaagatttgggcagaaactaaggacgcggctttagcattgaagcagatgccaagacagtgtctcgcagaaaatgcgttattatattctttatctaatcaaagaaaagaagaagatggaacttattctgagaacgcttattatactgctattatgaaaattcccagaaatttgagaactatgtatgtacatgcctaccaaagttacgtctggaattctattgctagtaagagaatagaattacatggtttgaagttagttgtaggtgaccttgtcattgatactagtgaaaagtctccattgatttctgggattgacgatgaagactttgatgaagatgtccgtgaagctcagttcattcgtgcaaaagcagtaactcaagaggatatcgactctgttaagtataccatggaagatgtcgtgttaccatctccgggttttgatgtgctttatccttccaacgaagaattgaagcaattatatgtggatatattgaaagcagataatatggacccatttaatatgagaagaaaagttcgcgatttttctttggctggctcttatagaactgttattcaaaagccaaagagtttagagtatagaataattcactatgatgatccttctcaacaattggtgaacactgatttggacatcttgaataacaccagagcaaaagaaagcggccagaagtatatgaaagccaagttggacagatatatgccagataaaggcggtgagaagactgcggtggtgttaaaatttcaattaggaacctccgcatatgccaccatggcattacgtgaactcatgaagcttgagacttctcgccgtggcgacatgtgtgatgttaaggagaatatctga

SEQ ID NO: 10595 - DNA, 1338 bp, Saccharomyces cerevisiae
atgtcccatgacggaaaagaagaacctggtattgccaaaaagataaactcagtagatgatattattatcaaatgtcaatgctgggtccaaaaaaatgatgaagaacgattagctgaaattttatccataaacacaagaaaagcaccaccaaaattctatgttcactatgttaattacaacaagcgtttagatgagtggattaccactgacagaataaacctggataaagaagtactatatccgaaactaaaggctactgatgaagataataagaaacaaaaaaagaagaaggcaacaaatactagtgaaacgccacaagactctctgcaagatggtgtagatggtttctcaagagaaaatacggatgttatggacttagataatctaaatgtacagggaataaaagatgagaacatatcacacgaggatgagataaaaaagcttagaacctccggctctatgacacaaaatccacatgaggtggctcgagttagaaatctcaatcgaatcattatggggaaatatgaaatagaaccatggtacttttctccatatcctattgaattaactgatgaagattttatatatatcgacgatttcacgttgcagtattttggatctaagaaacaatacgaacgctacaggaagaaatgtacattaagacatccgccaggaaatgaaatctacagagacgattatgtttcattctttgaaatcgatggtagaaagcaaaggacttggtgtcgaaacttgtgtttactttccaaacttttcctagatcacaaaacattatactatgacgttgatccgtttttgttttattgcatgacgagacgagatgagttgggtcaccatctggtgggatatttttccaaggaaaaagaatccgcggatggttacaatgttgcatgtatcttaacactaccacaataccaaaggatgggatatggtaagttattgattgaattttcgtatgaattgtcgaaaaaggaaaacaaagttggttctcccgagaaacctttgtctgatttgggtctcttatcctatagagcctattggtcggacactctcataacgctattagtggaacaccagaaggaaattactatagacgaaataagctccatgacttcgatgaccactacagatatattacacacagcaaagacactgaatatcctgcgatattacaagggtcagcatattattttcctgaatgaagatattttagataggtacaatcgacttaaagccaaaaagagaaggacaatagaccctaatagactcatatggaaaccaccggtatttactgcctctcagttacgctttgcctggtaa

SEQ ID NO: 10596 - DNA, 1338 bp, Artificial Sequence
  Description of Artificial Sequence: Synthetic polynucleotide
atgtcccatgacggaaaagaagaacctggtattgccaaaaagataaactctgtagatgatattattatcaaatgtcaatgctgggtccaaaaaaatgatgaagaaagattagctgaaattttatccataaacacaagaaaagcaccaccaaaattctatgttcactatgttaattacaacaagcgtttagatgagtggattaccactgacagaataaaccttgataaagaagtattatatccgaaattgaaggctactgatgaagataataagaaacaaaaaaagaagaaggcaacaaatactagtgaaacgccacaagactctttacaagatggtgtagatggtttcagtagagaaaatacggatgttatggacttagataatttgaatgtacagggaataaaagatgagaacatatctcacgaggatgagataaaaaagcttagaacctccggctctatgacacaaaatccacatgaggtggctcgtgttagaaatctcaatagaatcattatggggaaatatgaaatagaaccatggtacttttctccatatcctattgaattaactgatgaagattttatatatatcgacgatttcacgttgcagtattttggatctaagaaacaatacgaacgctacaggaagaaatgtacattaagacatccgccaggaaatgaaatctacagagacgattatgtttctttctttgaaatcgatggtagaaagcaaaggacttggtgtagaaacttgtgtttactttccaaacttttcttggatcacaaaacattatactatgacgttgatccgtttttgttttattgcatgacgagaagagatgagttgggtcaccatttggtgggatatttttccaaggaaaaagaatccgcggatggttacaatgttgcatgtatcttaacattaccacaataccaaaggatgggatatggtaagttattgattgaattttcttatgaattgagtaaaaaggaaaacaaagttggttctcccgagaaacctttgtctgatttgggtctcttatcctatagagcctattggtctgacactctcataacgttattagtggaacaccagaaggaaattactatagacgaaataagctccatgacttctatgaccactacagatatattacacacagcaaagacattaaatatcttgagatattacaagggtcagcatattattttcttgaatgaagatattttagataggtacaatagacttaaagccaaaaagagaaggacaatagaccctaatagactcatatggaaaccaccggtatttactgcctctcagttacgctttgcctggtga

SEQ ID NO: 10597 - DNA, 1257 bp, Saccharomyces cerevisiae
atgtcaggaacattcaatgatataagaagaaggaagaaggaagaaggaagccctacagccggtattaccgaaaggcatgagaataagtctttgtcaagcatcgataaaagagaacagactctcaaaccacaactagagtcatgctgtccattggcgaccccttttgaaagaaggttacaaactctggctgtagcatggcacacttcttcatttgtactcttctccatatttacgttatttgcaatctcgacaccagcactgtgggttcttgctattccatatatgatttatttttttttcgataggtctcctgcaactggcgaagtggtaaatcgatactctcttcgatttcgttcattgcccatttggaagtggtattgtgattatttccctataagtttgattaaaactgtcaatttaaaaccaacttttacgctttcaaaaaataagagagttaacgaaaaaaattacaagattagattgtggccaactaagtattccattaatctcaaaagcaactctactattgactatcgcaaccaggaatgtacagggccaacgtacttatttggttaccatccacacggcataggagcacttggtgcgtttggagcgtttgcaacagaaggttgtaactattccaagattttcccaggtattcctatttctctgatgacactggtcacacaatttcatatcccattgtatagagactacttattggcgttaggtatttcttcagtatctcggaaaaacgctttaaggactctaagcaaaaatcagtcgatctgcattgttgttggtggcgctagggaatctttattaagttcaacaaatggtacacaactgattttaaacaaaagaaagggttttattaaactggccattcaaacggggaatattaacctagtgcctgtgtttgcatttggagaggtggactgttataatgttctgagcacaaaaaaagattcagtcctgggtaaaatgcaactatggttcaaagaaaactttggttttaccattcccattttctacgcaagaggattattcaattacgatttcggtttgttgccatttagagcgcctatcaatgttgttgttggaaggcctatatacgttgaaaagaaaataacaaatccgccagatgatgttgttaatcatttccatgatttgtatattgcggagttgaaaagactatattacgaaaatagagaaaaatatggggtaccggatgcagaattgaagatagttgggtaa

SEQ ID NO: 10598 - DNA, 1257 bp, Artificial Sequence
  Description of Artificial Sequence: Synthetic polynucleotide
atgtctggaacattcaatgatataagaagaaggaagaaggaagaaggaagccctacagccggtattaccgaaaggcatgagaataagtctttgagtagcatcgataaaagagaacagactctcaaaccacaattggagagttgctgtccattggcgaccccttttgaaagaaggttacaaactttggctgtagcatggcacacttcttcttttgtactcttctccatatttacgttatttgcaatcagtacaccagcattatgggttcttgctattccatatatgatttatttttttttcgataggtctcctgcaactggcgaagtggtaaatagatactctcttagatttcgttctttgcccatttggaagtggtattgtgattatttccctataagtttgattaaaactgtcaatttaaaaccaacttttacgctttctaaaaataagagagttaacgaaaaaaattacaagattagattgtggccaactaagtattccattaatctcaaaagcaactctactattgactatcgcaaccaggaatgtacagggccaacgtacttatttggttaccatccacacggcataggagcacttggtgcgtttggagcgtttgcaacagaaggttgtaactattccaagattttcccaggtattcctatttctttgatgacattggtcacacaatttcatatcccattgtatagagactacttattggcgttaggtatttcttctgtatctagaaaaaacgctttaaggactttaagcaaaaatcagtctatctgcattgttgttggtggcgctagggaatctttattaagttctacaaatggtacacaattgattttaaacaaaagaaagggttttattaaattggccattcaaacggggaatattaacttggtgcctgtgtttgcatttggagaggtggactgttataatgttttaagcacaaaaaaagattctgtcttgggtaaaatgcaattatggttcaaagaaaactttggttttaccattcccattttctacgcaagaggattattcaattacgatttcggtttgttgccatttagagcgcctatcaatgttgttgttggaaggcctatatacgttgaaaagaaaataacaaatccgccagatgatgttgttaatcatttccatgatttgtatattgcggagttgaaaagattatattacgaaaatagagaaaaatatggggtaccggatgcagaattgaagatagttgggtga

SEQ ID NO: 10599 - DNA, 993 bp, Saccharomyces cerevisiae
atgttagacccacgaatattgccatactacgacccggctgtggagaggaagattgctgtagtaacaggcggaaatacgggtattgggtggtatactgtcttgcatttgtatttgcatgggtttgtcgtttatatttgtgggagaaactctcacaagatttcgaaagcaatccaggagatactggcagaagcaaagaagaggtgccatgaagatgacgacggttcaagcccaggcgcgggcccaggtccaagcattcagcgtctagggtcactgcactatatccatttggatttgacagacttaaaatgtgtggagagagcggcacttaaaattctcaagctggaagaccacatagacgtgcttgttaacaatgcagggattatggcggtgcccttagaaatgacgaaggacggatttgaagtgcaattgcagactaactacatttcgcacttcatcttcacgatgagattattgcctttactgcgccattgtcgtggcaggatcatttccctgtcctcgataggccatcatctagagttcatgtactggaaactgagcaagacgtgggattacaaacctaatatgcttttcacatggtttaggtacgcgatgagtaaaaccgcgctaatccaatgcacgaagatgttggccatcaaataccctgacgttctttgtctctccgttcatccgggtctggtgatgaacacaaacttattcagttattggacaaggttacccatcgtcggtattttcttttggctgttgttccaggtcgtagggttctttttcggcgtatcgaacgaacaaggttcactagcttctttgaagtgtgcattggacccgaatttatctgtcgaaaaagataacgggaagtacttcaccacggggggtaaagaatctaaatcgagctacgtttctaacaatgtcgacgaagcggcatcgacttggatctggaccgttcatcaactaagagaccgtggtttcgatatataa

SEQ ID NO: 10600 - DNA, 993 bp, Artificial Sequence
  Description of Artificial Sequence: Synthetic polynucleotide
atgttagacccaagaatattgccatactacgacccggctgtggagaggaagattgctgtagtaacaggcggaaatacgggtattgggtggtatactgtcttgcatttgtatttgcatgggtttgtcgtttatatttgtgggagaaactctcacaagatttccaaagcaatccaggagatattggcagaagcaaagaagaggtgccatgaagatgacgacggttccagcccaggcgcgggcccaggtccaagcattcagcgtcttgggtctttacactatatccatttggatttgacagacttaaaatgtgtggagagagcggcacttaaaattctcaagttggaagaccacatagacgtgcttgttaacaatgcagggattatggcggtgcccttagaaatgacgaaggacggatttgaagtgcaattgcagactaactacatttctcacttcatcttcacgatgagattattgcctttacttcgccattgtcgtggcaggatcatttccttgtcctccataggccatcatttagagttcatgtactggaaattaagcaagacgtgggattacaaacctaatatgcttttcacatggtttaggtacgcgatgagtaaaaccgcgttgatccaatgcacgaagatgttggccatcaaataccctgacgttctttgtctctccgttcatccgggtttagtgatgaacacaaacttattcagttattggacaaggttacccatcgtcggtattttcttttggttattgttccaggtcgtagggttctttttcggcgtatccaacgaacaaggttctttggcttctttgaagtgtgcattggacccgaatttatctgtcgaaaaagataacgggaagtacttcaccacggggggtaaagaatctaaaagtagctacgtttctaacaatgtcgacgaagcggcatctacttggatctggaccgttcatcaattgagagaccgtggtttcgatatatga

SEQ ID NO: 10601 - DNA, 633 bp, Saccharomyces cerevisiae
atgcttcaatccgttgtctttttcgctcttttaaccttcgcaagttctgtgtcagcgatttattcaaacaatactgtttctacaactaccactttagcgcccagctactccttggtgccccaagagactaccatatcgtacgccgacgacaccactaccttttttgtcacctcaacggtctactccacgagctggttcacctcaacttcagccaccattaccaatgcggcctcctcctccttgtccacctcttcggcctctggatctgtaaccccagaatccacccatgaaattacctccacctcgactatcacgtccactttgctgctaacccttcatgactccactactttgtctccatcatctactgcagcaagtgtcagtgacgaagattcaaacaacaaagatgcaaaggtcaagtcctttgaacaggcttcaacttccaatggttgcgtcccaatcacaaagtttgtcactgtcaccaatgagcccgttacccagtacgttacagtcaccccaaatacgactacacaatacgttactgtcaccggtgcaccttctgttaccactacctctccaggtaacgtacaatggtacaacaccacttcgattactaattcgaccagttggtga

SEQ ID NO: 10602 - DNA, 633 bp, Artificial Sequence
  Description of Artificial Sequence: Synthetic polynucleotide
atgcttcaatccgttgtctttttcgctcttttaaccttcgcaagttctgtgtctgcgatttattccaacaatactgtttctacaactaccactttagcgcccagctactccttggtgccccaagagactaccatatcttacgccgacgacaccactaccttttttgtcacctctacggtctactccacgagctggttcacctctacttctgccaccattaccaatgcggcctcctcctccttgtccacctcttctgcctctggatctgtaaccccagaatccacccatgaaattacctccacctctactatcacgtccactttgttattaacccttcatgactccactactttgtctccatcttctactgcagcaagtgtcagtgacgaagattccaacaacaaagatgcaaaggtcaagtcctttgaacaggcttccacttccaatggttgcgtcccaatcacaaagtttgtcactgtcaccaatgagcccgttacccagtacgttacagtcaccccaaatacgactacacaatacgttactgtcaccggtgcaccttctgttaccactacctctccaggtaacgtacaatggtacaacaccacttctattactaattctaccagttggtga

SEQ ID NO: 10603 - DNA, 2058 bp, Saccharomyces cerevisiae
atgagtaagtatggtccattgggtattactaactttattactccgtacgatctatgcatattaatcctaatacatgctcactgctcacaagataatggcatatcagtgccaacagcagtatttcttcggttaatatcccctactagaccttcactagaatggaatcctctgctcaaggataatagtaatttaagatcttcatctattgttcctcctcctgtacttcctattctagataatataataaggatactgttagatgacaaggatggtaacaaaatagctctgacattaatgggctatttggaagcaattaatggactggattcaatcaacagactaatgatggatttagaaaagaactgtttggttaataattacaggtcaatgaaaatgcgtacaacatcaacaagaagacaaatgacaagagcgagttttttaggaacatttttgtcaacttgtatacgcaagtatcaaattggtgattttgaaatgagggagacaatctggattaatctacaaaatttcaaaactgtatttaagcatactccgctatggctacgatttaaagataacgttcatattcaaaaggtaaaaaactgtcttctggctaacgacgagatctcggtggaggatcaacagatggtggaatttttccaacacttcaataatggtaatgacgctgattcaaaaacaatgaacgaagaaaattatgggacattgatttccatccaacatttacaatcaatagttaatcgacaaattgtgaattggttagataatacagaatttaatctgatgggtcaagaagaaactagttccacatatgaagaacaaagcggactagtttttgatttgctagatacgctttcattgaacgatgccacaaaattccctttgatttttatattaaagtatctcgaagctataaaagagaacagttatcaaaccgcactagattctctacataactattttgattacaagtccacgggcaattctcaaaattacttccatatctccttgttgtcccttgccaccttccactcaagtttcaatgagtgtgatgcagcgataaattcttttgaggaagccacgagaatcgcaagggaaaataaagatatggaaacgttgaatttgataatgatatggataataaacttcatagaggtgcacccggaatatgcaaacagattttatatcacagtagaacaaataataaaatatctgaaaaatagttcagatgtagaagatgccaatattttcagtaacgcctacaagtttgaaacattgttatctatggtcaaagaatcgaaaactgctgaagtttctagttcacttctgaaattcatggctatcactttgcagaacgtgccttctcaaaactttgatcttttccaaagtcttgttagctatgaagtaaaattttggaaagaactgggatacgaatccatatccgatgtatatgagaaattcctgtctaaaacatcctcttcctctttaaggaactacgactcttctattatcaaccaagatataaaggtagctttcaaggcacttgaagaagacgattttttaaaagtaaaacaataccttttgaaatcagaatcactggaactagactacgaccaaaaaataaatttgaaatatttaagagtgaagtatctcgttaaaataggtgactatgacctaagcatgcgattaatcaaccaatatgtcaaggagtgctgtgaagaagtggcggattcgaactggagattcaaatttgaaattgaaagtatcaatgttttacttttaagtgacgtagggataagaagtttgccgaagataataaaattaatcgacgaatacaaagagataggaaatcctttgcgatgtgtaatattattgcttaaattatgtgaagttttgattcaggtagggaagagtatggaggcagagtgcttgatcagctgtaacctatcaaccattctagaattcccatttgtaaggaagaagacagatgagcttttggaatctcttagtgttgaagaggatagggatgttcagatgacttga

SEQ ID NO: 10604 - DNA, 2058 bp, Artificial Sequence
  Description of Artificial Sequence: Synthetic polynucleotide
atgagtaagtatggtccattgggtattactaactttattactccgtacgatttatgcatattaatcttaatacatgctcactgctctcaagataatggcatatctgtgccaacagcagtatttcttcgtttaatatcccctactagaccttctttggaatggaatcctttactcaaggataatagtaatttaagatcttcttctattgttcctcctcctgtacttcctattttagataatataataaggatattattagatgacaaggatggtaacaaaatagctttaacattaatgggctatttggaagcaattaatggattagattctatcaacagattaatgatggatttagaaaagaactgtttggttaataattacaggtctatgaaaatgcgtacaacatctacaagaagacaaatgacaagagcgagttttttaggaacatttttgtctacttgtatacgcaagtatcaaattggtgattttgaaatgagggagacaatctggattaatttacaaaatttcaaaactgtatttaagcatactccgttatggttaagatttaaagataacgttcatattcaaaaggtaaaaaactgtcttttagctaacgacgagatcagtgtggaggatcaacagatggtggaatttttccaacacttcaataatggtaatgacgctgattctaaaacaatgaacgaagaaaattatgggacattgatttccatccaacatttacaaagtatagttaatagacaaattgtgaattggttagataatacagaatttaatttaatgggtcaagaagaaactagttccacatatgaagaacaaagcggattggtttttgatttgttggatacgctttctttgaacgatgccacaaaattccctttgatttttatattaaagtatctcgaagctataaaagagaacagttatcaaaccgcattggattctttgcataactattttgattacaagtccacgggcaattctcaaaattacttccatatctccttgttgtcccttgccaccttccacagcagtttcaatgagtgtgatgcagcgataaattcttttgaggaagccacgagaatcgcaagggaaaataaagatatggaaacgttgaatttgataatgatatggataataaacttcatagaggtgcacccggaatatgcaaacagattttatatcacagtagaacaaataataaaatatttgaaaaatagttctgatgtagaagatgccaatattttcagtaacgcctacaagtttgaaacattgttatctatggtcaaagaaagtaaaactgctgaagtttctagttctcttttgaaattcatggctatcactttgcagaacgtgccttctcaaaactttgatcttttccaaagtcttgttagctatgaagtaaaattttggaaagaattaggatacgaatccatatccgatgtatatgagaaattcttatctaaaacatcctcttcctctttaaggaactacgactcttctattatcaaccaagatataaaggtagctttcaaggcacttgaagaagacgattttttaaaagtaaaacaataccttttgaaaagtgaatctttggaattagactacgaccaaaaaataaatttgaaatatttaagagtgaagtatctcgttaaaataggtgactatgacttgagcatgagattaatcaaccaatatgtcaaggagtgctgtgaagaagtggcggattccaactggagattcaaatttgaaattgaaagtatcaatgttttacttttaagtgacgtagggataagaagtttgccgaagataataaaattaatcgacgaatacaaagagataggaaatcctttgagatgtgtaatattattgcttaaattatgtgaagttttgattcaggtagggaagagtatggaggcagagtgcttgatcagctgtaacttatctaccattttggaattcccatttgtaaggaagaagacagatgagcttttggaatctcttagtgttgaagaggatagggatgttcagatgacttga

SEQ ID NO: 10605 - DNA, 1338 bp, Saccharomyces cerevisiae
atggcaagtctacctggtattgatgagcatactacctctgaagaattgataactggtgataacgaatggcacaagttggttattcccaagggcagtgattggcaaattgatcttaaagcagagggaaaactgatagtcaaggtaaactcgggcatagttgagatatttggcaccgagttggcagtagatgatgagtacacttttcagaactggaagtttcccatatacgctgtcgaagaaacagaattattatggaaatgtcctgatttaactacgaatacaataactgtcaagcctaaccatactatgaaatatatttataatctacacttcatgttggagaagatacgaatgtctaactttgaaggccctcgagtggtgattgttggtggttcgcaaaccgggaagacttccctatcgaggacactatgttcttacgctttgaaattcaacgcttaccaaccactatacatcaatcttgaccctcaacagcccatttttactgttcctggatgcatatctgccaccccaatatcagatatacttgatgcacaactacccacttggggtcagagtctcactagtggtgccacactactacataataagcagccaatggtgaaaaattttggcctggaaaggattaatgagaacaaagatctataccttgagtgtataagccagttaggtcaagtagtaggtcaaaggttacatttggatcctcaagtcaggagatcagggtgcattgtcgatacgccatcaatatcacaactggatgaaaatttggctgaactgcaccatatcattgagaaactcaatgttaacattatgctagtactatgttctgaaacggatcctctttgggagaaagtaaaaaagacatttggtccagaattgggaaataataatatttttttcattcctaaattggatggtgtatccgcagttgatgatgtatacaaaagatccttgcagaggacatccataagagagtacttttacggctctcttgatacagccttgagtccttatgctattggtgttgattatgaggatttaactatttggaaacctagcaatgttttcgataacgaggtcggtagggtggaactgttccccgtcactataactccaagtaacctacagcacgctattatagccataacgttcgcagaaagaagggcagatcaggcaacagtaataaaatcgcctattttaggattcgctttgattacagaagttaatgaaaaaaggcgtaaattaagggttttactacctgtcccaggccgacttcccagcaaggcgatgattctaacttcatatagatatttagagtaa

SEQ ID NO: 10606 - DNA, 1338 bp, Artificial Sequence
  Description of Artificial Sequence: Synthetic polynucleotide
atggcaagtttacctggtattgatgagcatactacctctgaagaattgataactggtgataacgaatggcacaagttggttattcccaagggcagtgattggcaaattgatcttaaagcagagggaaaattgatagtcaaggtaaacagtggcatagttgagatatttggcaccgagttggcagtagatgatgagtacacttttcagaactggaagtttcccatatacgctgtcgaagaaacagaattattatggaaatgtcctgatttaactacgaatacaataactgtcaagcctaaccatactatgaaatatatttataatttacacttcatgttggagaagataagaatgtctaactttgaaggccctagagtggtgattgttggtggttctcaaaccgggaagacttccttatctaggacattatgttcttacgctttgaaattcaacgcttaccaaccattgtacatcaatcttgaccctcaacagcccatttttactgttcctggatgcatatctgccaccccaatatctgatatacttgatgcacaattgcccacttggggtcagagtctcactagtggtgccacattgttgcataataagcagccaatggtgaaaaattttggccttgaaaggattaatgagaacaaagatttataccttgagtgtataagccagttaggtcaagtagtaggtcaaaggttacatttggatcctcaagtcaggagaagcgggtgcattgtcgatacgccaagtatatctcaattggatgaaaatttggctgaattgcaccatatcattgagaaactcaatgttaacattatgttggtattatgttctgaaacggatcctctttgggagaaagtaaaaaagacatttggtccagaattgggaaataataatatttttttcattcctaaattggatggtgtatccgcagttgatgatgtatacaaaagatccttgcagaggacatccataagagagtacttttacggctctcttgatacagccttgagtccttatgctattggtgttgattatgaggatttaactatttggaaacctagcaatgttttcgataacgaggtcggtagggtggaattattccccgtcactataactccaagtaacttacagcacgctattatagccataacgttcgcagaaagaagggcagatcaggcaacagtaataaaatctcctattttaggattcgctttgattacagaagttaatgaaaaaaggcgtaaattaagggttttattgcctgtcccaggcaggcttcccagcaaggcgatgattttgacttcttatagatatttagagtga

SEQ ID NO: 10607 - DNA, 915 bp, Saccharomyces cerevisiae
atgccattatttgatcttatttctccaaaagcgtttgttaagttagtggccagtgagaaggttcatagaatcgttccagttgatgcaacatggtacctacccagttggaagcttgataataaagtggatttcttgaccaaaccacgtataccaaactccattttctttgatattgatgcaatcagtgacaaaaaatcgccctatccacatatgttccctacaaagaaggtttttgacgacgctatgagtaatttaggagttcaaaaagatgatatattagtggtttacgatcgtgttggtaactttagctcccctagatgtgcttggacattaggagtgatgggacatcctaaggtgtacttactaaataatttcaaccagtacagagagtttaagtaccctctagattcctctaaggtggcagcgttttcaccctatccaaagagtcattatgagtcctcagaaagtttccaagacaaggagattgtagactatgaggaaatgttccaattggtaaagagtggggaactggctaagaaattcaatgctttcgatgcaaggtcgctcggtagattcgaaggtacagaaccagagcctcgttccgacattccatcggggcatattccaggtacccaaccattaccatatggaagtttacttgatccggagaccaaaacgtacccagaagctggggaggcgatacacgctactttggaaaaggcattgaaagactttcattgcactttggacccaagtaaaccaactatttgctcttgtggaactggcgtttcaggagtcattatcaagacagcattggagctagcaggagttcccaatgttagattatatgatggatcctggaccgagtgggtcttgaaatccgggcccgagtggattgctgaaaacagagattaa

SEQ ID NO: 10608 - DNA, 915 bp, Artificial Sequence
  Description of Artificial Sequence: Synthetic polynucleotide
atgccattatttgatcttatttctccaaaagcgtttgttaagttagtggccagtgagaaggttcatagaatcgttccagttgatgcaacatggtacttgcccagttggaagcttgataataaagtggatttcttgaccaaaccacgtataccaaactccattttctttgatattgatgcaatcagtgacaaaaaaagtccctatccacatatgttccctacaaagaaggtttttgacgacgctatgagtaatttaggagttcaaaaagatgatatattagtggtttacgatcgtgttggtaactttagctcccctagatgtgcttggacattaggagtgatgggacatcctaaggtgtacttattgaataatttcaaccagtacagagagtttaagtaccctttggattcctctaaggtggcagcgttttctccctatccaaagagtcattatgagtccagtgaaagtttccaagacaaggagattgtagactatgaggaaatgttccaattggtaaagagtggggaattggctaagaaattcaatgctttcgatgcaaggtctctcggtagattcgaaggtacagaaccagagcctcgttccgacattccatctgggcatattccaggtacccaaccattaccatatggaagtttacttgatccggagaccaaaacgtacccagaagctggggaggcgatacacgctactttggaaaaggcattgaaagactttcattgcactttggacccaagtaaaccaactatttgctcttgtggaactggcgtttctggagtcattatcaagacagcattggagttggcaggagttcccaatgttagattatatgatggatcctggaccgagtgggtcttgaaatccgggcccgagtggattgctgaaaacagagattga

SEQ ID NO: 10609 - DNA, 537 bp, Saccharomyces cerevisiae
atgccggttactaaatctttatctaagttgcaaaagaacttatccaagaaagggaaaaatatcacggttcatccgaagggtagaaagtatgaaaagctggtcagggctactatgcgtgaagataaaatcgcagccaaaaagaagcttcatcaagacaaaagagtccacgaactagctcgggtaaaatttatgcaggatgtagttaactctgatacattcaaagggcaaccaatatttgatcacgcccacacaagagagtttattcaaagttttattgaaagagatgatacggaattagacgaactcaagaagaagaggaggtcaaacaggccaccaagcaatagacaagtgctactgcaacaaaggagggatcaagagttaaaagaatttaaggcggggtttctctgtccagacttgagtgatgcgaagaatatggaatttctaagaaactggaatggcacttttggccttttgaatactctaagattgatcagaattaatgataaaggtgaacaagtcgttggaggaaatgaataa

SEQ ID NO: 10610 - DNA, 537 bp, Artificial Sequence
  Description of Artificial Sequence: Synthetic polynucleotide
atgccggttactaaatctttatctaagttgcaaaagaacttatccaagaaagggaaaaatatcacggttcatccgaagggtagaaagtatgaaaagttggtcagggctactatgcgtgaagataaaatcgcagccaaaaagaagcttcatcaagacaaaagagtccacgaattggctcgtgtaaaatttatgcaggatgtagttaactctgatacattcaaagggcaaccaatatttgatcacgcccacacaagagagtttattcaaagttttattgaaagagatgatacggaattagacgaactcaagaagaagaggaggtctaacaggccaccaagcaatagacaagtgttgttgcaacaaaggagggatcaagagttaaaagaatttaaggcggggtttctctgtccagacttgagtgatgcgaagaatatggaatttttaagaaactggaatggcacttttggccttttgaatactttgagattgatcagaattaatgataaaggtgaacaagtcgttggaggaaatgaatga

SEQ ID NO: 10611 - DNA, 531 bp, Saccharomyces cerevisiae
atgggccgtgatatatgcacattagacaatgtttacgctaacaatttgggcatgctaaccaaactagctcatgtgacagtaccaaacttatatcaagatgccttcttcagtgcattattcgctgaggatagcttagttgcaaaaaataaaaagccatcttcgaagaaggatgtacatttcacacagatggcttattacagtgaaataccagtgggtggtttggttgctaaattagttcctaaaaaacaaaacgaactatctctcaagggcattcaaatcgaatttttgggcgtgttgcctaattataggcacaaatccatcggttcaaaattactgaagtttgcagaagacaaatgctcagaatgtcatcaacataacgtgtttgtctatttaccagcagtggatgatcttacaaagcaatggtttatagctcatggcttcgaacaagtgggcgaaactgtcaacaatttcataaaaggtgtaaatggcgacgaacaagatgctatcttattgaaaaaacacatttcttaa

SEQ ID NO: 10612 - DNA, 531 bp, Artificial Sequence
  Description of Artificial Sequence: Synthetic polynucleotide
atgggccgtgatatatgcacattagacaatgtttacgctaacaatttgggcatgttgaccaaattggctcatgtgacagtaccaaacttatatcaagatgccttcttcagtgcattattcgctgaggatagcttagttgcaaaaaataaaaagccatcttccaagaaggatgtacatttcacacagatggcttattacagtgaaataccagtgggtggtttggttgctaaattagttcctaaaaaacaaaacgaattatctctcaagggcattcaaatcgaatttttgggcgtgttgcctaattataggcacaaatccatcggttccaaattattgaagtttgcagaagacaaatgcagtgaatgtcatcaacataacgtgtttgtctatttaccagcagtggatgatcttacaaagcaatggtttatagctcatggcttcgaacaagtgggcgaaactgtcaacaatttcataaaaggtgtaaatggcgacgaacaagatgctatcttattgaaaaaacacatttcttga

SEQ ID NO: 10613 - DNA, 1992 bp, Saccharomyces cerevisiae
atgcctacaaattacgagtatgatgaggctagtgagacgtggccgtccttcattttaacggggctcttgatggtcgtcgggcctatgacactgcttcaaatataccaaattttttttggggccaatgctgaagatgggaattcagggaagagtaaggagtttaatgaggaagttttcaagaacttgaatgaagaatacaccagtgatgaaatcaaacaatttagaaggaagtttgataaaaatagtaataagaagtccaaaatatggagcaggagaaatattataattattgtgggttggatcttagttgcaattcttctgcaaaggattaatagtaatgacgcgattaaagacgctgctacaaaattatttgatccttatgaaatccttggtatctctactagtgcttccgatagagacatcaaatctgcttatagaaaattatctgttaaatttcatccagataaattagcaaagggcctaacacctgatgagaaaagtgtgatggaagaaacttatgttcagattacgaaggcttacgaatcccttactgacgaattggttaggcaaaactatttgaaatacggtcatccagatggcccacaatctacttcacatggtatcgctctaccaagatttttggtagatggaagtgcatctccattattagtggtttgttatgttgcgctactaggtttaatcttgccatattttgttagtagatggtgggcaagaacacaatcgtatactaagaagggaatacataatgtgacggcttctaattttgttagtaacttagtcaattacaagccatctgagattgtcaccacagatttgatcttacactggttatcatttgctcatgaatttaaacaattcttcccggatttgcaaccaacggattttgaaaaacttttgcaagatcatattaaccgcagagatagtggtaaacttaacaatgcgaaatttagaatagtggccaaatgtcactctttgttacacggtttattggatattgcttgtggattcagaaatttagatattgcattgggtgcaatcaatactttcaagtgtattgttcaggctgtaccattaacaccaaactgtcaaatccttcaattgccgaacgtagataaagagcactttattaccaaaaccggagatattcatacattaggtaaattgtttactttagaagatgccaagattggtgaggttcttggaataaaggatcaagcaaagttaaacgaaactttgagagttgcatcgcatattccaaatctaaagatcatcaaggcagacttccttgtcccaggtgagaaccaagtaacaccatcatctaccccatacatttctttgaaagtactggttcgttctgctaaacagccattgataccaactagcttaattcctgaagaaaatttaacagaacctcaagattttgaatctcaaagagatccatttgctatgatgagtaaacagccactcgtcccatattcctttgcaccatttttccctacaaagagacgtgggagttggtgctgtctggtaagttctcaaaaagatggtaaaatacttcaaacgccaattatcattgaaaagctatcttacaagaacttgaacgatgacaaagatttctttgataagaggataaaaatggatttaaccaaacacgaaaaattcgatataaatgattgggaaatcgggaccataaaaattccattaggtcagcctgcacctgaaactgttggtgatttcttttttagagtaatcgttaaatccacagattatttcactacagatttggatattaccatgaatatgaaagttcgtgattctcctgcagtggaacaagtagaggtgtattctgaggaggatgatgagtactctactgatgacgacgaaaccgaaagtgatgatgaaagtgatgctagcgattatactgatatcgatacggatacagaagctgaagatgatgaatcaccagaatag

SEQ ID NO: 10614 - DNA, 1992 bp, Artificial Sequence
  Description of Artificial Sequence: Synthetic polynucleotide
atgcctacaaattacgagtatgatgaggctagtgagacgtggccgtccttcattttaacggggctcttgatggtcgtcgggcctatgacattgcttcaaatataccaaattttttttggggccaatgctgaagatgggaatagtgggaagagtaaggagtttaatgaggaagttttcaagaacttgaatgaagaatacaccagtgatgaaatcaaacaatttagaaggaagtttgataaaaatagtaataagaagtccaaaatatggagcaggagaaatattataattattgtgggttggatcttagttgcaattcttttacaaaggattaatagtaatgacgcgattaaagacgctgctacaaaattatttgatccttatgaaatccttggtatctctactagtgcttccgatagagacatcaaatctgcttatagaaaattatctgttaaatttcatccagataaattagcaaagggcttaacacctgatgagaaaagtgtgatggaagaaacttatgttcagattacgaaggcttacgaatcccttactgacgaattggttaggcaaaactatttgaaatacggtcatccagatggcccacaatctacttctcatggtatcgctttgccaagatttttggtagatggaagtgcatctccattattagtggtttgttatgttgcgttattgggtttaatcttgccatattttgttagtagatggtgggcaagaacacaaagttatactaagaagggaatacataatgtgacggcttctaattttgttagtaacttagtcaattacaagccatctgagattgtcaccacagatttgatcttacactggttatcttttgctcatgaatttaaacaattcttcccggatttgcaaccaacggattttgaaaaacttttgcaagatcatattaaccgcagagatagtggtaaacttaacaatgcgaaatttagaatagtggccaaatgtcactctttgttacacggtttattggatattgcttgtggattcagaaatttagatattgcattgggtgcaatcaatactttcaagtgtattgttcaggctgtaccattaacaccaaactgtcaaatccttcaattgccgaacgtagataaagagcactttattaccaaaaccggagatattcatacattaggtaaattgtttactttagaagatgccaagattggtgaggttcttggaataaaggatcaagcaaagttaaacgaaactttgagagttgcatctcatattccaaatttgaagatcatcaaggcagacttccttgtcccaggtgagaaccaagtaacaccatcttctaccccatacatttctttgaaagtattggttcgttctgctaaacagccattgataccaactagcttaattcctgaagaaaatttaacagaacctcaagattttgaatctcaaagagatccatttgctatgatgagtaaacagccactcgtcccatattcctttgcaccatttttccctacaaagagacgtgggagttggtgctgtttggtaagttctcaaaaagatggtaaaatacttcaaacgccaattatcattgaaaagttatcttacaagaacttgaacgatgacaaagatttctttgataagaggataaaaatggatttaaccaaacacgaaaaattcgatataaatgattgggaaatcgggaccataaaaattccattaggtcagcctgcacctgaaactgttggtgatttcttttttagagtaatcgttaaatccacagattatttcactacagatttggatattaccatgaatatgaaagttcgtgattctcctgcagtggaacaagtagaggtgtattctgaggaggatgatgagtactctactgatgacgacgaaaccgaaagtgatgatgaaagtgatgctagcgattatactgatatcgatacggatacagaagctgaagatgatgaatctccagaatga

SEQ ID NO: 10615 - DNA, 837 bp, Saccharomyces cerevisiae
atgagagcaccaccttcaccgagaaagtccaaatctggtcattttttttacctatattttcgactgtgtcaactgttcagtggccggaaattaaagaggaggtggcatgtccacaaacttcacattcaccaatataatactcgctggaacttgagccccctctccgaaatacacattgaggacatgataaatgaaccgtctggactatgtccaggaagttccaaaaagaaaccactactgattgcaaggtttcccaagggttgccaagaatcaccaagggtatatgtactgcaaaggaacaatttgtctcgtttaaaattaagcaaaagaaaatatgccctaaggttctatcacaatgaaatttttggcaataatttaaagagaaaagacggaagcatccacaaagttgaacaccaacagtgcgcagaaaccgttagaaagatcaagaaagtcacagcaaaccatgctgatgttaaaataatatttcacgataaaaatactataagaagtgacaaattagggggtaggagtaataagatgcagactaggcctagtgttcttgaagaggatgtagaagaagaagtctcttcggtatatatcagattttgtgacgaccattccctgagagttaaagattatcactctttgcacaggcattctaaaaaatcttctaaagaaaaacgaaataatcaggagattggaaaatctaagttgcttgggaagctttttgaagaggaaacatcgcgtcaaaacaaaggtgtagagaagaaactagatacgattgtgatacagaaatttcaaaattatcctattgtctccttctctcgtgtcatttaa

SEQ ID NO: 10616 - DNA, 837 bp, Artificial Sequence
  Description of Artificial Sequence: Synthetic polynucleotide
atgagagcaccaccttctccgagaaagtccaaatctggtcattttttttacttatattttagattatgtcaattattcagtggcagaaaattaaagaggaggtggcatgtccacaaacttcacattcaccaatataatactcgctggaacttgagccccctctccgaaatacacattgaggacatgataaatgaaccgtctggattatgtccaggaagttccaaaaagaaaccattattgattgcaaggtttcccaagggttgccaagaatctccaagggtatatgtattacaaaggaacaatttgtctcgtttaaaattaagcaaaagaaaatatgccttaaggttctatcacaatgaaatttttggcaataatttaaagagaaaagacggaagcatccacaaagttgaacaccaacagtgcgcagaaaccgttagaaagatcaagaaagtcacagcaaaccatgctgatgttaaaataatatttcacgataaaaatactataagaagtgacaaattagggggtaggagtaataagatgcagactaggcctagtgttcttgaagaggatgtagaagaagaagtctcttctgtatatatcagattttgtgacgaccattccttgagagttaaagattatcactctttgcacaggcattctaaaaaatcttctaaagaaaaaagaaataatcaggagattggaaaatctaagttgcttgggaagctttttgaagaggaaacatctcgtcaaaacaaaggtgtagagaagaaattggatacgattgtgatacagaaatttcaaaattatcctattgtctccttctctcgtgtcatttga

SEQ ID NO: 10617 - DNA, 2430 bp, Saccharomyces cerevisiae
atgaggagcagttatcaaccagtgtcaactacaaactttgaacatgaaaatgctatacctactgcgtcgtcgtcccataatctgttgatgagccagcgttttgatgattctcctcctagttctaacgacaacagtatagaaactaatataacgcctccacctgaaccaccttcttatgaatttgatatagaggaccctcacgatgatcttcacaaaagaacacatctacagagggtttcaattgggtttcaggaaaaaattttggaacccttaatggaaaacatcattcatccactcttacaaatatcaaaattcgttccagacaaagctgactattacttaagtaaaatcggaaatccctttatacttcgaaggttcttttacatcattttcatgtcatttattgcatattatgtcttgtcaagtggctacttattcaacgaaaaggcatcaggatctaaagggatgttttctcaacacgatatactttttgaatatgccaaaaaatccgtggatttggcaaagtttgagagagatttggaatatattagtagcatgcctcatggatccggaacgaagggtgatgcagctatttatcgatacattcaggaatcttttgacaacaatgggttgaaattggttaaagaaatgggatactcagtttattctaattatccaggcaatgtatcaatttcatattatgataacaagaatgaaaagcatgatctagaactttctaaagaaaatttcaatccgttgagttctaacgggaaattatccaaagtgagcttgatttatggaggcaaaggtacaacatacgatttacaacatttaaaagattcgaaaacgatagaagatgggaaggactatgtgcttttactgcaatatgataaattagtgagtcagcaagtactaattgctgagaaattcggagctaaagctgtaatcttcatatctgagccatatggtgagaatatagacgttgttcaatctaagcctgtaggattgccccaatattcgactggtgatgcatcaggattgaattgggatggttctcctgtagaagaaaaggatcataaattttggcgtcaaactcatattccaactatcccaatctccacgagacaaggaaaagagctactatcgcgtttatcttcaggaggagtaacggttgatgatggtaatagtgatcgtagtaacagtgggaaaatgggagacgtattgatcgatgtagatctgcaaactaatgttagggaaaagcattttattcctaatattgttggtaaaattgaagggagagaacaatcagacaaagctataataattgctgcatcgagaaattccatcaattttggaactacttatcccaattttggtacagctgcattattatctatagttcaattattccaagaggtgaaatataagtttggttggaaacctttgagaaatatctatttcatctcattcggtggtaccgaatttaattatgctggatcttcggagctggttgagcaaaggctaacgccattaaaagacgaaatttattctttgattgatattagtcaactgggtataccctttgccgaaaaatatgagaacggtaaaactagaggagaattaagcattgagacacatcccttattgaagaagtttttcaatagaaacgcgcatggaaactttgatatatctgtggataatgtacagcactatggtgactggactccatttctggcaaatggaattcctgtatctgtaatatcttctgattctacgagaaaccgtgacaccccaactgaaacatctgaggataaatttgaacgtgttgagaagattctggaagacgaacagaaccaacaatctgtcaaggatttgctagtatatcttttacatattagtatggaattgattgatgacccgctacttcattttgacataataagctatgttgaagatatcgatgaaagattgcaaaggttagagcaagcataccctgaaaaactaaacttcacatcaataatcaaaggtttgttattttggaagaaaatcggtagcgaatgggcgtcatggactcaaggttgggagaacatagtatggtcgcatggggatggtatagagccctccttactttcaattaataggtggacatggaataaaaaattgactaatattggtagaagaacatgctctccggcgggtctacctaatagatcattttataagaacgttttgttcggaccaacattgatacaggaggataaatctaaaaatggtggaaatgtagatttctggacatttccaggagtgatggatgcgatttacgatgatgactggaagagggctcaagaacaaattgaccttattggcaaagtactccatcagtctgctgcattgtttgtcgaagagactaatgacatcgggtataaataa

SEQ ID NO: 10618 - DNA, 2430 bp, Artificial Sequence
  Description of Artificial Sequence: Synthetic polynucleotide
atgaggagcagttatcaaccagtgtccactacaaactttgaacatgaaaatgctatacctactgcgtcttcttcccataatttattgatgagccagcgttttgatgattctcctcctagttctaacgacaacagtatagaaactaatataacgcctccacctgaaccaccttcttatgaatttgatatagaggaccctcacgatgatcttcacaaaagaacacatttacagagggtttctattgggtttcaggaaaaaattttggaacccttaatggaaaacatcattcatccactcttacaaatatccaaattcgttccagacaaagctgactattacttaagtaaaatcggaaatccctttatacttagaaggttcttttacatcattttcatgagttttattgcatattatgtcttgagcagtggctacttattcaacgaaaaggcatctggatctaaagggatgttttctcaacacgatatactttttgaatatgccaaaaaatccgtggatttggcaaagtttgagagagatttggaatatattagtagcatgcctcatggatccggaacgaagggtgatgcagctatttatagatacattcaggaatcttttgacaacaatgggttgaaattggttaaagaaatgggatactctgtttattctaattatccaggcaatgtatctatttcttattatgataacaagaatgaaaagcatgatttggaactttctaaagaaaatttcaatccgttgagttctaacgggaaattatccaaagtgagcttgatttatggaggcaaaggtacaacatacgatttacaacatttaaaagattctaaaacgatagaagatgggaaggactatgtgcttttattacaatatgataaattagtgagtcagcaagtacttattgctgagaaattcggagctaaagctgtaatcttcatatctgagccatatggtgagaatatagacgttgttcaatctaagcctgtaggattgccccaatattctactggtgatgcatctggattgaattgggatggttctcctgtagaagaaaaggatcataaattttggcgtcaaactcatattccaactatcccaatctccacgagacaaggaaaagagttattatctcgtttatcttctggaggagtaacggttgatgatggtaatagtgatcgtagtaacagtgggaaaatgggagacgtattgatcgatgtagatttgcaaactaatgttagggaaaagcattttattcctaatattgttggtaaaattgaagggagagaacaatctgacaaagctataataattgctgcatctagaaattccatcaattttggaactacttatcccaattttggtacagctgcattattatctatagttcaattattccaagaggtgaaatataagtttggttggaaacctttgagaaatatctatttcatctctttcggtggtaccgaatttaattatgctggatcttctgagttagttgagcaaaggttgacgccattaaaagacgaaatttattctttgattgatattagtcaattgggtataccctttgccgaaaaatatgagaacggtaaaactagaggagaattaagcattgagacacatcccttattgaagaagtttttcaatagaaacgcgcatggaaactttgatatatctgtggataatgtacagcactatggtgactggactccatttttggcaaatggaattcctgtatctgtaatatcttctgattctacgagaaaccgtgacaccccaactgaaacatctgaggataaatttgaacgtgttgagaagattttggaagacgaacagaaccaacaatctgtcaaggatttgttagtatatcttttacatattagtatggaattgattgatgacccgttacttcattttgacataataagctatgttgaagatatcgatgaaagattgcaaaggttagagcaagcataccctgaaaaattgaacttcacatctataatcaaaggtttgttattttggaagaaaatcggtagcgaatgggcgtcttggactcaaggttgggagaacatagtatggtctcatggggatggtatagagccctccttactttctattaataggtggacatggaataaaaaattgactaatattggtagaagaacatgctctccggcgggtttgcctaatagatctttttataagaacgttttgttcggaccaacattgatacaggaggataaatctaaaaatggtggaaatgtagatttctggacatttccaggagtgatggatgcgatttacgatgatgactggaagagggctcaagaacaaattgaccttattggcaaagtactccatcagtctgctgcattgtttgtcgaagagactaatgacatcgggtataaatga

SEQ ID NO: 10619 - DNA, 486 bp, Saccharomyces cerevisiae
atgagtaagaacaggtcatcgctacagtctggtccacttaatagcgagttattggaggagcaaaagcaagaaatatatgaggcgttttcattgttcgatatgaacaatgatgggttcctcgattaccacgagttgaaagtagcaatgaaggccctgggatttgagctacccaagagagaaatacttgacttaatagatgaatatgatagtgaggggcggcatttgatgaagtatgatgatttttatattgtaatgggggaaaaaatattgaagagagatccgttagatgaaataaaaagggcattccaattatttgatgacgaccatactgggaaaataagtattaaaaacttgaggcgtgtagctaaagaattaggagaaactttgacggatgaagagctgagagcgatgattgaagagtttgatttggatggtgatggcgagattaatgaaaacgaatttatagctatttgcaccgatagttaa

SEQ ID NO: 10620 - DNA, 486 bp, Artificial Sequence
  Description of Artificial Sequence: Synthetic polynucleotide
atgagtaagaacaggtcctctttgcagtctggtccacttaatagcgagttattggaggagcaaaagcaagaaatatatgaggcgttttctttgttcgatatgaacaatgatgggttcctcgattaccacgagttgaaagtagcaatgaaggccttaggatttgagttgcccaagagagaaatacttgacttaatagatgaatatgatagtgaggggagacatttgatgaagtatgatgatttttatattgtaatgggggaaaaaatattgaagagagatccgttagatgaaataaaaagggcattccaattatttgatgacgaccatactgggaaaataagtattaaaaacttgaggcgtgtagctaaagaattaggagaaactttgacggatgaagagttaagagcgatgattgaagagtttgatttggatggtgatggcgagattaatgaaaacgaatttatagctatttgcaccgatagttga

SEQ ID NO: 10621 - DNA, 654 bp, Saccharomyces cerevisiae
atgtcatggaggtatgcgttaaaaaactacgttaccagcccagaaacggtaaacgatgatacagtcacatactttgatgataaagtgtccataattagagactcgtttcctaaatcagagtgccatttattgattctaccacgaactatgcagctgagtagaagtcatcctactaaagtgattgatgctaagtttaagaatgagtttgaatcatacgttaattctgcgattgaccacatctttaggcattttcaagaaaagttccgaataaagaagagtgatgatgacaaagacccctgctgggatgacatattaaaagacaaaaacaagtttgtaagaaattttgtacaagttgggatacacagcgtgccttcgatggccaacttacatatacacgtcatatccaaagatttccattcggtaagattgaagaacaaaaaacattataattcatttaatactggattcttcattagttgggacgatttaccattgaacggaaaaaatttgggcactgacaaggaaattgaaactacgtacctgaaagaacacgatttactttgctgctattgtcagcgaaattttagtaataaatttagcttattgaaaaagcatttagaactagagttcaatagccatttcgagcttaaataa

SEQ ID NO: 10622 - DNA, 654 bp, Artificial Sequence
  Description of Artificial Sequence: Synthetic polynucleotide
atgtcttggaggtatgcgttaaaaaactacgttaccagcccagaaacggtaaacgatgatacagtcacatactttgatgataaagtgtccataattagagactcttttcctaaaagtgagtgccatttattgattttaccaagaactatgcagttgagtagaagtcatcctactaaagtgattgatgctaagtttaagaatgagtttgaatcttacgttaattctgcgattgaccacatctttaggcattttcaagaaaagttcagaataaagaagagtgatgatgacaaagacccctgctgggatgacatattaaaagacaaaaacaagtttgtaagaaattttgtacaagttgggatacacagcgtgccttctatggccaacttacatatacacgtcatatccaaagatttccattctgtaagattgaagaacaaaaaacattataattcttttaatactggattcttcattagttgggacgatttaccattgaacggaaaaaatttgggcactgacaaggaaattgaaactacgtacttgaaagaacacgatttactttgctgctattgtcagagaaattttagtaataaatttagcttattgaaaaagcatttagaattagagttcaatagccatttcgagcttaaatga

SEQ ID NO: 10623 - DNA, 1314 bp, Saccharomyces cerevisiae
atgagtgaagaacaggaccctttattagcaggattgggggaaacgtccggcgacaatcacacccaacagtcacacgaacaacaaccagaacaaccacaggaaacggaagaacatcatgaagaggagccttctagagtggatcctgaacaggaggcccataacaaggccttgaatcaattcaagagaaagctgctagaacacagaaggtatgatgatcaattgaagcagcgccgtcaaaatatacgagatctagagaagttatatgacaagactgaaaacgacataaaagctttgcaaagtattggacaattgattggcgaagtcatgaaggaattatctgaagagaaatatatagtgaaggcctcttcgggcccacgttatattgtcggagttaggaattcggtagatcgctctaaattaaagaaaggggtgagagtcaccttagatatcaccactttgactataatgagaattttgcccagagagacagatccactggtgtataatatgaccagttttgaacaaggtgaaatcacttttgatggtattggtggtttgactgagcaaatcagagaattaagggaggttatagaattaccattgaagaacccagaaattttccagagggtcggtatcaaacctccaaagggtgtgctactatatggtccccctggtactggtaaaactttactagcgaaggcagttgctgctacgattggagccaacttcattttctctccagcgtctggtattgtggataaatacattggtgagtctgctcgtattattagagaaatgtttgcatatgcaaaggaacacgaaccttgcatcatttttatggatgaagtggatgctattggtggtagaagattcagtgaaggtacttcagcagaccgtgaaattcaacgtacgttgatggagttgttgacccagatggatggttttgataatcttggacagactaaaatcatcatggctacgaatagaccagatactttagatcctgctttgttgaggcccggtagactagacaggaaagttgaaatcccattgccaaatgaggccggcagattagaaattttcaaaattcatactgcaaaagtcaaaaaaacaggggaatttgacttcgaggctgctgtaaaaatgagtgatggtttcaatggtgctgatattcgtaactgtgcaactgaagcaggttttttcgccataagagatgaccgtgatcacatcaaccctgatgatttaatgaaagccgtaagaaaagtagctgaagttaagaaattggaaggcactatagaataccaaaaattatga

SEQ ID NO: 10624 - DNA, 1314 bp, Artificial Sequence
  Description of Artificial Sequence: Synthetic polynucleotide
atgagtgaagaacaggaccctttattagcaggattgggggaaacgtccggcgacaatcacacccaacagtctcacgaacaacaaccagaacaaccacaggaaacggaagaacatcatgaagaggagccttctagagtggatcctgaacaggaggcccataacaaggccttgaatcaattcaagagaaagttattggaacacagaaggtatgatgatcaattgaagcagcgccgtcaaaatataagagatttagagaagttatatgacaagactgaaaacgacataaaagctttgcaaagtattggacaattgattggcgaagtcatgaaggaattatctgaagagaaatatatagtgaaggcctcttctggcccacgttatattgtcggagttaggaattctgtagatcgctctaaattaaagaaaggggtgagagtcaccttagatatcaccactttgactataatgagaattttgcccagagagacagatccattggtgtataatatgaccagttttgaacaaggtgaaatcacttttgatggtattggtggtttgactgagcaaatcagagaattaagggaggttatagaattaccattgaagaacccagaaattttccagagggtcggtatcaaacctccaaagggtgtgcttttatatggtccccctggtactggtaaaactttattggcgaaggcagttgctgctacgattggagccaacttcattttctctccagcgtctggtattgtggataaatacattggtgagtctgctcgtattattagagaaatgtttgcatatgcaaaggaacacgaaccttgcatcatttttatggatgaagtggatgctattggtggtagaagattcagtgaaggtacttctgcagaccgtgaaattcaacgtacgttgatggagttgttgacccagatggatggttttgataatcttggacagactaaaatcatcatggctacgaatagaccagatactttagatcctgctttgttgaggcccggtagattagacaggaaagttgaaatcccattgccaaatgaggccggcagattagaaattttcaaaattcatactgcaaaagtcaaaaaaacaggggaatttgacttcgaggctgctgtaaaaatgagtgatggtttcaatggtgctgatattcgtaactgtgcaactgaagcaggttttttcgccataagagatgaccgtgatcacatcaaccctgatgatttaatgaaagccgtaagaaaagtagctgaagttaagaaattggaaggcactatagaataccaaaaattatga

SEQ ID NO: 10625 - DNA, 1737 bp, Saccharomyces cerevisiae
atgtcaattcaggcttttgtcttttgcggtaaaggttccaatttggctcccttcacccagccagattttccattccaaacgcagaacaaagacagtacagctgccacgagcggtgacaaacttaatgagttggtcaatagcgccctcgattcaactgtcataaatgagttcatgcaacattcaacgcgcttgcccaaggctcttttgcccatcggtaatagacctatgattgaatacgtcttggattggtgtgatcaggcagatttcaaagaaatcagtgtggtcgcacccgttgacgaaatcgaattaattgaaagtggactgacttcgtttttgtccctaagaaagcaacaatttgaactaatatacaaggctttgtcaaattccaaccacagtcatcacttgcaagatcctaagaaaattaatttcatcccttcgaaggcaaattctacaggtgagtccttgcaaaaagagcttttgcctagaatcaatggcgattttgtaatcttgccctgtgattttgtcacagatatacctccacaagtcttggtcgatcaatttaggaatagggatgataataacctagcaatgactatctactataagaactctttagatagtagtatcgataaaaagcaacagcaaaagcaaaaacaacagcaatttttcactgtttattcagaaaacgaagactcagagaggcagccaatacttttggacgtttattctcaaagggacgtcacaaagacaaaatatctacagatcagatctcatttattatggaactatccaaatttaacagtatccactaagttactgaactcattcatctacttttgttcctttgaactttgccagttgttaaaattaggacctcaatcaatgtcaagacaagcttcattcaaagatccatttactggaaaccaacaacagcaaaaccctcctactactgatgatgatgaagatcgcaatcatgatgatgacgatgattacaaaccttcggctacatctatccagcctacctacttcaaaaaaaagaatgatctcatcttggacccaataaactgtaataaatcattgagtaaggtttttagagatttatctcgtcgttcgtggcaacattcgaaaccgagggaaccaataggtatttttattttaccaaacgaaaccttgttcatcagagccaataacttgaatgcttacatggacgctaatagatttgtactaaagataaaatcacaaacgatgttcacgaaaaatatacagattcaatctgccgctatcggtgctgatgccatagtagatcccaaatgccaaatctctgctcatagtaatgtcaagatgtctgttctcggtactcaggccaatattggttccagatgtcgtgttgcagggtctctcttatttcctggagtccatcttggtgacgaagtaatcctggaaaattgtattattggacctatggcaaaaatcggttcaaagtgtaaactcagcaattgttatatcgaaggccattatgttgtggagcctaaaaataactttaaaggtgaaacactggccaacgtttatttggatgaagatgaggaggacgagttaatatatgatgatagtgttattgctggagaaagtgaaatcgccgaagaaactgacagtgatgatagaagcgatgaagattctgatgatagtgaatataccgacgagtacgagtacgaagatgacggattatttgagcgttaa

SEQ ID NO: 10626 - DNA, 1737 bp, Artificial Sequence
  Description of Artificial Sequence: Synthetic polynucleotide
atgtctattcaggcttttgtcttttgcggtaaaggttccaatttggctcccttcacccagccagattttccattccaaacgcagaacaaagacagtacagctgccacgagcggtgacaaacttaatgagttggtcaatagcgccctcgattctactgtcataaatgagttcatgcaacattctacgcgcttgcccaaggctcttttgcccatcggtaatagacctatgattgaatacgtcttggattggtgtgatcaggcagatttcaaagaaatcagtgtggtcgcacccgttgacgaaatcgaattaattgaaagtggattaacttcttttttgtccttgagaaagcaacaatttgaattgatatacaaggctttgagcaattccaaccacagtcatcacttgcaagatcctaagaaaattaatttcatcccttctaaggcaaattctacaggtgagtccttgcaaaaagagcttttgcctagaatcaatggcgattttgtaatcttgccctgtgattttgtcacagatatacctccacaagtcttggtcgatcaatttaggaatagggatgataataacttggcaatgactatctactataagaactctttagatagtagtatcgataaaaagcaacagcaaaagcaaaaacaacagcaatttttcactgtttattctgaaaacgaagactctgagaggcagccaatacttttggacgtttattctcaaagggacgtcacaaagacaaaatatttacagatcagatctcatttattatggaactatccaaatttaacagtatccactaagttattaaactctttcatctacttttgttcctttgaactttgccagttgttaaaattaggacctcaatctatgagtagacaagcttctttcaaagatccatttactggaaaccaacaacagcaaaaccctcctactactgatgatgatgaagatcgcaatcatgatgatgacgatgattacaaaccttctgctacatctatccagcctacctacttcaaaaaaaagaatgatctcatcttggacccaataaactgtaataaatctttgagtaaggtttttagagatttatctcgtcgttcttggcaacattctaaaccgagggaaccaataggtatttttattttaccaaacgaaaccttgttcatcagagccaataacttgaatgcttacatggacgctaatagatttgtattgaagataaaatctcaaacgatgttcacgaaaaatatacagattcaatctgccgctatcggtgctgatgccatagtagatcccaaatgccaaatctctgctcatagtaatgtcaagatgtctgttctcggtactcaggccaatattggttccagatgtcgtgttgcagggtctctcttatttcctggagtccatcttggtgacgaagtaatcttggaaaattgtattattggacctatggcaaaaatcggttccaagtgtaaactcagcaattgttatatcgaaggccattatgttgtggagcctaaaaataactttaaaggtgaaacattggccaacgtttatttggatgaagatgaggaggacgagttaatatatgatgatagtgttattgctggagaaagtgaaatcgccgaagaaactgacagtgatgatagaagcgatgaagattctgatgatagtgaatataccgacgagtacgagtacgaagatgacggattatttgagcgttga

SEQ ID NO: 10627 - DNA, 1017 bp, Saccharomyces cerevisiae
atgtctctacaacacgagaaagttaccattgcaccactagttttgctatctgctttggatcattatgagcgtacgcagacaaaagaaaacaaaagatgcgttggtgtcatcttaggtgatgctaacagttccactatcagagtcactaattcctttgccttaccgtttgaagaagatgagaaaaactctgacgtgtggtttttagaccataattatattgaaaacatgaatgaaatgtgtaaaaagattaatgccaaggaaaaactcattggatggtatcatagtggtcctaaattaagggcttctgacctcaagattaatgagctgtttaaaaaatatactcagaataatccgctattattaattgttgatgtcaaacaacaaggtgttggtttaccaacagatgcatatgtcgcgattgagcaagttaaggatgatggtacgtctacagaaaagacgtttcttcatttgccttgtactattgaggccgaagaagctgaagaaattggtgtagaacacttattgagagacgtacgtgatcaagcagcaggtggcttatctatccggttgaccaaccaattaaaatctttgaaaggattacaaagcaaactaaaagacgttgtcgagtacttagacaaagtcattaataaggaattaccgataaaccacactatattgggcaagctacaagatgttttcaaccttttaccaaatctgggaacacctgatgatgacgaaatagatgtggagaatcatgacagaattaatatttcaaataacttacaaaaggctttaactgtgaaaactaatgatgaattaatggttatatatataagcaatttggttaggtcaattatcgcgtttgatgatttgattgaaaacaaaattcaaaataaaaaaattcaagaacaaagagtaaaggacaaacaatcaaaagtctctgatgacagtgagagtgagagtggtgacaaagaagcaactgcgccattgatccaacgaaagaacaagaaaaattaa

SEQ ID NO: 10628 - DNA, 1017 bp, Artificial Sequence
  Description of Artificial Sequence: Synthetic polynucleotide
atgtctttacaacacgagaaagttaccattgcaccattagttttgttatctgctttggatcattatgagcgtacgcagacaaaagaaaacaaaagatgcgttggtgtcatcttaggtgatgctaacagttccactatcagagtcactaattcctttgccttaccgtttgaagaagatgagaaaaactctgacgtgtggtttttagaccataattatattgaaaacatgaatgaaatgtgtaaaaagattaatgccaaggaaaaactcattggatggtatcatagtggtcctaaattaagggcttctgacctcaagattaatgagttatttaaaaaatatactcagaataatccgttgttattaattgttgatgtcaaacaacaaggtgttggtttaccaacagatgcatatgtcgcgattgagcaagttaaggatgatggtacgtctacagaaaagacgtttcttcatttgccttgtactattgaggccgaagaagctgaagaaattggtgtagaacacttattgagagacgtacgtgatcaagcagcaggtggcttatctatcaggttgaccaaccaattaaaatctttgaaaggattacaaagcaaattgaaagacgttgtcgagtacttagacaaagtcattaataaggaattaccgataaaccacactatattgggcaagttacaagatgttttcaaccttttaccaaatttaggaacacctgatgatgacgaaatagatgtggagaatcatgacagaattaatatttctaataacttacaaaaggctttaactgtgaaaactaatgatgaattaatggttatatatataagcaatttggttaggtctattatcgcgtttgatgatttgattgaaaacaaaattcaaaataaaaaaattcaagaacaaagagtaaaggacaaacaaagtaaagtctctgatgacagtgagagtgagagtggtgacaaagaagcaactgcgccattgatccaaagaaagaacaagaaaaattga

SEQ ID NO: 10629 - DNA, 1044 bp, Saccharomyces cerevisiae
atgcccttcgctcagattgttattggtccaccaggttcagggaagtcaacctattgcaacggctgctcacagttcttcaatgccatcggaagacattcccaggtagtgaatatggatcctgctaatgatgccttaccttacccatgcgctgtggatattcgtgattttataacattagaggagatcatgcaagagcaacagttaggccctaatggaggtttgatgtatgctgttgaatcattggataattctattgatttgttcattttacagatcaagtcacttgtagaagaagaaaaagcatatcttgtattcgactgtccgggccaagtggagctatttactcatcactcatctttgttcaacatctttaaaaaaatggaaaaggaattggacattaggttttgtgttgtaaatttgattgactgtttttacatgacatccccttcacaatatatctcgattttgttacttgcattgaggtctatgttaatgatggatctccctcacatcaacgttttttctaaaatagatatgctgaaatcatacggagaattaccctttagattagactattatacagaggtccaggatctggattatttggagccatatattgaaaaggaaggctctagtgtactgggaaagaaatatagcaagttaactgaaacaatcaaagagctagtctcagatttcaacttagtatcatttgaggttttgtccgtggatgacaaagaaagtatgataaatcttcaaggtgttatagataaagcaaatggctacatattcggcgcatccgaagttggtggtgataccgtgtgggctgaggcttcgcgagaaggtgcattaatagcgaattacgacattcaagacaggtggatagacaataaagagaagtatgataaagaagaagaagaaaaacgtacggcgttgttaaaagaacaagaattgcaaaataaagctgttgatgtgaatgaagaagatgagtgggaaaatgcgctgaaggagtgggaagagaaacaaggaatggattttgttaggtag

SEQ ID NO: 10630 - DNA, 1044 bp, Artificial Sequence
  Description of Artificial Sequence: Synthetic polynucleotide
atgcccttcgctcagattgttattggtccaccaggttctgggaagtctacctattgcaacggctgcagccagttcttcaatgccatcggaagacattcccaggtagtgaatatggatcctgctaatgatgccttaccttacccatgcgctgtggatattcgtgattttataacattagaggagatcatgcaagagcaacagttaggccctaatggaggtttgatgtatgctgttgaatctttggataattctattgatttgttcattttacagatcaagtctcttgtagaagaagaaaaagcatatcttgtattcgactgtccgggccaagtggagttatttactcatcactcttctttgttcaacatctttaaaaaaatggaaaaggaattggacattaggttttgtgttgtaaatttgattgactgtttttacatgacatccccttctcaatatatctctattttgttacttgcattgaggtctatgttaatgatggatctccctcacatcaacgttttttctaaaatagatatgttgaaatcttacggagaattaccctttagattagactattatacagaggtccaggatttggattatttggagccatatattgaaaaggaaggctctagtgtattgggaaagaaatatagcaagttaactgaaacaatcaaagagttggtctctgatttcaacttagtatcctttgaggttttgtccgtggatgacaaagaaagtatgataaatcttcaaggtgttatagataaagcaaatggctacatattcggcgcatccgaagttggtggtgataccgtgtgggctgaggcttctagagaaggtgcattaatagcgaattacgacattcaagacaggtggatagacaataaagagaagtatgataaagaagaagaagaaaaacgtacggcgttgttaaaagaacaagaattgcaaaataaagctgttgatgtgaatgaagaagatgagtgggaaaatgcgttaaaggagtgggaagagaaacaaggaatggattttgttaggtga

SEQ ID NO: 10631 - DNA, 1293 bp, Saccharomyces cerevisiae
atgccaagaaagtttttgggcaataaaattgaaaagaatgttgatgcagtcagaccatcttcgctaacattaacagctgatgacttgaagtatattccaccgataccacaagattttgaagatgaagatgataaggttttacgtaccagcaacggtggtaacaggttgtctaaaagatttgggggtacactgaaactgaagaaacggttagagtctgttccagaattgttcttacatgatttcaagaagaggccacgctcccaacttgaggtgattagagagaaaaaatttactgacatgcaagttcccaagggaccagtttgtcctcaaagcacgattctaccattacgagaaagaaagaaggtaaaatcactaccaattcaaagaaaaagtttacgtaggccgacgctgtcaaagcctgcagtagtacaatctttagggcataagacacattcggatcatattattgataaagtgtttgtctctcgcccggccccaattgtaatgcctgtaaaagcccttactcctattaatccggtctccctaatgcaaacacagacacaagattgctgtagaaaaaataagtatggcaaaagcggtagtgaaatattgtttgacgaaattctatcagcctatgaaaacgtttctacaagcgattctactgccctaaattcagaaattgacagaattatcgatatatgcgcttcaaaacaaatagctaaaaaaaatgaggcatttcaggtaccatatgtcgtctgccctgacgacacagagactttgttttcgtcaacaacaccaaagttgaaacctgtcaattctaacacattaaacgatgtcatttctagcccagaatacaccacgtctggatgcagtacatactctgaccaatcgaattcagatgaggaattgtccgaagtagaaagtatagtatggaacacgaataagaggacaatgagatcatccattgtgtctgaaagcactagtgaggaaggctattgcactgctgcggagactttgccctcaacagtatcagtggaagatctggatatacataacaagcttccaaaagttgcacaaacatcatcgtgcaatacgcttttgaataaactctctataagaaaattaaaaaaagtaattctcgatccgcctaaaataatgcatgtcatgacttttgacgatgacagtgatgatggagatgacaacgatgacgaggatagggctttgaatattcttcaaaaaaaaattgactgcattgaaatagcaagttgcagcagtagcatttacagcgaataa

SEQ ID NO: 10632 - DNA, 1293 bp, Artificial Sequence
  Description of Artificial Sequence: Synthetic polynucleotide
atgccaagaaagtttttgggcaataaaattgaaaagaatgttgatgcagtcagaccatcttctttaacattaacagctgatgacttgaagtatattccaccgataccacaagattttgaagatgaagatgataaggttttacgtaccagcaacggtggtaacaggttgtctaaaagatttgggggtacattaaaattgaagaaaagattagagtctgttccagaattgttcttacatgatttcaagaagaggccacgctcccaacttgaggtgattagagagaaaaaatttactgacatgcaagttcccaagggaccagtttgtcctcaaagcacgattttaccattaagagaaagaaagaaggtaaaatctttaccaattcaaagaaaaagtttacgtaggccgacgttatccaagcctgcagtagtacaatctttagggcataagacacattctgatcatattattgataaagtgtttgtctctcgcccggccccaattgtaatgcctgtaaaagcccttactcctattaatccggtctccttgatgcaaacacagacacaagattgctgtagaaaaaataagtatggcaaaagcggtagtgaaatattgtttgacgaaattttatctgcctatgaaaacgtttctacaagcgattctactgccttgaattctgaaattgacagaattatcgatatatgcgcttccaaacaaatagctaaaaaaaatgaggcatttcaggtaccatatgtcgtctgccctgacgacacagagactttgttttcttctacaacaccaaagttgaaacctgtcaattctaacacattaaacgatgtcatttctagcccagaatacaccacgtctggatgcagtacatactctgaccaaagcaattctgatgaggaattgtccgaagtagaaagtatagtatggaacacgaataagaggacaatgagaagttccattgtgtctgaaagcactagtgaggaaggctattgcactgctgcggagactttgccctccacagtatctgtggaagatttggatatacataacaagcttccaaaagttgcacaaacatctagttgcaatacgcttttgaataaactctctataagaaaattaaaaaaagtaattctcgatccgcctaaaataatgcatgtcatgacttttgacgatgacagtgatgatggagatgacaacgatgacgaggatagggctttgaatattcttcaaaaaaaaattgactgcattgaaatagcaagttgcagcagtagcatttacagcgaatga

SEQ ID NO: 10633 - DNA, 321 bp, Saccharomyces cerevisiae
atggcacccacacaattggatataaaagtcaaggccttgaagaggctgactaaggaggaagggtactaccaacaagaactgaaagatcaggaagcacatgtggcaaaacttaaagaagacaagtcagttgacccatatgacttgaagaaacaggaggaggtccttgatgacacaaaaagattattacctactttatatgagaagattagagaatttaaagaggatttagaacaatttctaaaaacttaccagggtaccgaagatgtcagtgatgcaagatccgctattacgtctgcacaggaattactcgattctaaataa

SEQ ID NO: 10634 - DNA, 321 bp, Artificial Sequence
  Description of Artificial Sequence: Synthetic polynucleotide
atggcacccacacaattggatataaaagtcaaggccttgaagaggttaactaaggaggaagggtactaccaacaagaattgaaagatcaggaagcacatgtggcaaaacttaaagaagacaagtctgttgacccatatgacttgaagaaacaggaggaggtccttgatgacacaaaaagattattacctactttatatgagaagattagagaatttaaagaggatttagaacaatttttgaaaacttaccagggtaccgaagatgtcagtgatgcaagatccgctattacgtctgcacaggaattactcgattctaaatga

SEQ ID NO: 10635 - DNA, 1272 bp, Saccharomyces cerevisiae
atggattctcgagttgcactggtacgaaaatacatagcaccatcggtgataaaaagcgattctattcaattgcacggtttagtgaaggcaccactatttaaagcgttgaatagccgttacaaattaggttcactacagatagtacaggatgtcgattggaatgcgaagacaacaccatccgattctccagagcctctggccgctactctaaactctaatcgatccctaccaatgactaagttccccaagcaggagatcttggaacaggtaaaattggatactaaggttggcaaatggaggaaattcatgacaggttggtttagaattggattgtatcttttaaaaagctataaaacaggaattcagaacacgttaaaagtattctgggatactcgaaacgaagagcagaaattcagcataaaaaacggtgcattggctaacttagtacgggaaatagaaatgcatgaaatcaatacaagactatcgtcttcatcattgcctacaagttcttcagcaaaagccccattaaggccactttcaatcaataggaaaacactggtggaactgatcagacgagatcaaatctggaaattacctgtatttttcaccttagtattcatatttgaggaggtaagtgtattgatctttaccttttttccacgtgtctgtccgtacaattgtttaactcctggtggatacaagaagctttccaactcatatatcaagggaacaacaagcacacaaggtaactacggtctgggtcccttagagtttactaagcaaggtacaattaagtatgagccaccatatgcagttcctattgagaatttgtataattttctgacaagctttcctcaaagtatgatatcaaactggaaactgtatatttataaaaagttaaaattacagaagctactttgcaatgagatagaaaaaatttaccagtatctgtttatcgatgactggttgctgttgcagagtatactcaacactgatgttgagaaaactaaaatcgcgctaagtgatagagaattggttaactgtatacttgaaagaaaactttatcacatgggcgatgacttgaatgagatggttaatgacacgttagggaaagaaatcttactgaaaagattgtttctttattggacattaagatataatgacactatatccttaaacggaaagcatacattcagtgagaaatggggtgtcaacaatatatcattgttaaaatataattcagaattggtagctacgaaagatattcaatag

SEQ ID NO: 10636 - DNA, 1272 bp, Artificial Sequence
  Description of Artificial Sequence: Synthetic polynucleotide
atggattctagagttgcattggtaagaaaatacatagcaccatctgtgataaaaagcgattctattcaattgcacggtttagtgaaggcaccattatttaaagcgttgaatagccgttacaaattaggttctttgcagatagtacaggatgtcgattggaatgcgaagacaacaccatccgattctccagagcctttggccgctactttgaactctaatagatccttgccaatgactaagttccccaagcaggagatcttggaacaggtaaaattggatactaaggttggcaaatggaggaaattcatgacaggttggtttagaattggattgtatcttttaaaaagctataaaacaggaattcagaacacgttaaaagtattctgggatactagaaacgaagagcagaaattcagcataaaaaacggtgcattggctaacttagtaagagaaatagaaatgcatgaaatcaatacaagattatcttcttcttctttgcctacaagttcttctgcaaaagccccattaaggccactttctatcaataggaaaacattagtggaattgatcagaagagatcaaatctggaaattacctgtatttttcaccttagtattcatatttgaggaggtaagtgtattgatctttaccttttttccacgtgtctgtccgtacaattgtttaactcctggtggatacaagaagctttccaacagttatatcaagggaacaacaagcacacaaggtaactacggtttaggtcccttagagtttactaagcaaggtacaattaagtatgagccaccatatgcagttcctattgagaatttgtataattttttaacaagctttcctcaaagtatgataagcaactggaaactttatatttataaaaagttaaaattacagaagcttctttgcaatgagatagaaaaaatttaccagtatttatttatcgatgactggttgttgttgcagagtatactcaacactgatgttgagaaaactaaaatcgcgttaagtgatagagaattggttaactgtatacttgaaagaaaactttatcacatgggcgatgacttgaatgagatggttaatgacacgttagggaaagaaatcttattgaaaagattgtttctttattggacattaagatataatgacactatatccttaaacggaaagcatacattcagtgagaaatggggtgtcaacaatatatctttgttaaaatataattctgaattggtagctacgaaagatattcaatga

SEQ ID NO: 10637 - DNA, 2280 bp, Saccharomyces cerevisiae
atgcctaatctattgtcgagaaacccattccatggtcatcataatgaccatcatcatgaccgtgaaaattcgtctaataacccgccacagttgatcagaagttctaaatctttcttaaacttcattggtagaaaacaaagtaatgactcactaagaagcgagaaatctacagattccatgaaatctaccacaaccactacaaattatactacaacaaaccttaataacaacacccatagccattctaatgcaaccagtatctcaacaaacaactacaataataactatgaaacaaaccaccaccataatatttctcatgggctccatgactatacttctcccgcctctccaaaacaaacccactccatggcagaattgaaaaggtttttcagaccttctgtaaataaaaaactatctatgtctcaacttcgttccaagaaacatagcacccattcccccccaccttcaaaatcaacttctacagttaatttaaataatcactatcgtgcccagcatcctcatggctttacagaccactatgctcatacccagtctgctataccgccaagtaccgattctatcctatctttgtccaataatattaatatatatcacgatgattgtattctggctcaaaaatacgggaaattgggtaagttattgggttccggtgccggtgggtccgttaaagttcttgtgagaccaactgatggtgctacttttgccgtcaaagaattcagaccaaggaaaccgaatgagagtgtgaaagaatatgccaagaagtgcaccgcagaattttgtattggttcgactttacatcacccaaatgttatcgaaactgttgacgttttctctgattctaaacaaaataaatactatgaagttatggagtactgtccgattgatttttttgctgttgttatgacaggcaagatgtctcgtggcgagatcaactgttgcttgaagcaattgactgaaggtgttaaatatttacattctatgggattggcacatagagatttgaaattggataattgtgtcatgacttcccagggtattttgaaattaattgattttggtagtgctgttgtgttcagatatccttttgaagatggcgtaacgatggctcatggaatcgtgggtagtgacccttacttagcgccggaagtgattacctccaccaaatcttatgatcctcagtgcgtcgatatatggtctattgggatcatatattgttgtatggtgcttaaaaggtttccatggaaagcccctagagattctgacgataattttagattatattgtatgccggatgatatagaacacgactatgttgaatctgccaggcatcacgaagagttactgaaggaaagaaaagaaaagcgtcaaaggtttttgaatcacagtgactgttccgccatcaatcagcaacaaccagctcatgaatcaaacttgaaaacagttcaaaatcaagttccaaatactccagcatctatacagggtaaaagcgataacaaaccagacattgtggaagaagaaaccgaagaaaataaagaagatgatagcaataatgataaagaaagcacgccagataatgacaaggaaagtaccatcgatattaaaataagcaaaaatgagaataaaagcacggtagtttcagctaacccaaagaaagtagatgccgatgccgacgctgattgcgatgctaatggtgactctaacggcagagtggattgcaaggctaacagtgactgcaatgacaaaacggattgtaatgctaacaatgactgcagcaatgaatcggattgtaacgctaaagttgatactaacgtcaacactgctgccaacgctaaccctgatatggttccccaaaacaatccacaacaacaacaacaacaacaacaacaacaacaacaacaacaacaacaacaacaacaacaacaccatcatcaccagcatcaaaatcaagacaaggcccatagtatcgcttccgataataaatcgagtcaacagcacagaggacctcaccataaaaaaattattcatggcccataccgtctattacgtctactaccacatgcttcaagacctatcatgtcccgtatactgcaagtagatccaaagaaaagagcaaccttagatgatatttttaatgatgaatggtttgccgccattgctgcctgtaccatggattcaaaaaataaagttattagagcgcctggccatcaccatacattggttagggaggaaaatgctcacttagagacctacaaggtttaa

SEQ ID NO: 10638 - DNA, 2280 bp, Artificial Sequence
  Description of Artificial Sequence: Synthetic polynucleotide
atgcctaatttattgtccagaaacccattccatggtcatcataatgaccatcatcatgaccgtgaaaattcttctaataacccgccacagttgatcagaagttctaaatctttcttaaacttcattggtagaaaacaaagtaatgactctttgagaagcgagaaatctacagattccatgaaatctaccacaaccactacaaattatactacaacaaaccttaataacaacacccatagccattctaatgcaaccagtatcagtacaaacaactacaataataactatgaaacaaaccaccaccataatatttctcatgggctccatgactatacttctcccgcctctccaaaacaaacccactccatggcagaattgaaaaggtttttcagaccttctgtaaataaaaaattatctatgtctcaacttcgttccaagaaacatagcacccattcccccccaccttccaaatctacttctacagttaatttaaataatcactatcgtgcccagcatcctcatggctttacagaccactatgctcatacccagtctgctataccgccaagtaccgattctatcctttctttgtccaataatattaatatatatcacgatgattgtattttggctcaaaaatacgggaaattgggtaagttattgggttccggtgccggtgggtccgttaaagttcttgtgagaccaactgatggtgctacttttgccgtcaaagaattcagaccaaggaaaccgaatgagagtgtgaaagaatatgccaagaagtgcaccgcagaattttgtattggttctactttacatcacccaaatgttatcgaaactgttgacgttttctctgattctaaacaaaataaatactatgaagttatggagtactgtccgattgatttttttgctgttgttatgacaggcaagatgtctcgtggcgagatcaactgttgcttgaagcaattgactgaaggtgttaaatatttacattctatgggattggcacatagagatttgaaattggataattgtgtcatgacttcccagggtattttgaaattaattgattttggtagtgctgttgtgttcagatatccttttgaagatggcgtaacgatggctcatggaatcgtgggtagtgacccttacttagcgccggaagtgattacctccaccaaatcttatgatcctcagtgcgtcgatatatggtctattgggatcatatattgttgtatggtgcttaaaaggtttccatggaaagcccctagagattctgacgataattttagattatattgtatgccggatgatatagaacacgactatgttgaatctgccaggcatcacgaagagttattgaaggaaagaaaagaaaagcgtcaaaggtttttgaatcacagtgactgttccgccatcaatcagcaacaaccagctcatgaatctaacttgaaaacagttcaaaatcaagttccaaatactccagcatctatacagggtaaaagcgataacaaaccagacattgtggaagaagaaaccgaagaaaataaagaagatgatagcaataatgataaagaaagcacgccagataatgacaaggaaagtaccatcgatattaaaataagcaaaaatgagaataaaagcacggtagtttctgctaacccaaagaaagtagatgccgatgccgacgctgattgcgatgctaatggtgactctaacggcagagtggattgcaaggctaacagtgactgcaatgacaaaacggattgtaatgctaacaatgactgcagcaatgaaagtgattgtaacgctaaagttgatactaacgtcaacactgctgccaacgctaaccctgatatggttccccaaaacaatccacaacaacaacaacaacaacaacaacaacaacaacaacaacaacaacaacaacaacaacaacaccatcatcaccagcatcaaaatcaagacaaggcccatagtatcgcttccgataataaatctagtcaacagcacagaggacctcaccataaaaaaattattcatggcccataccgtttattacgtttgttaccacatgcttccagacctatcatgtcccgtatattgcaagtagatccaaagaaaagagcaaccttagatgatatttttaatgatgaatggtttgccgccattgctgcctgtaccatggattctaaaaataaagttattagagcgcctggccatcaccatacattggttagggaggaaaatgctcacttagagacctacaaggtttga

SEQ ID NO: 10639 - DNA, 399 bp, Saccharomyces cerevisiae
atggtttttgttttccccttcccatttttttcttatggtttttccagttttctagaagccggaaaaaaggcaagctacaaaatgtactacgcggagccagaattaaaaaccacgcggacgggacgggccgtggcttgtgacgccggatccccgcgtataatccgtgtcacgctaaaggacaaaatcggtttatccgagcggtttacgggaagggtcttttgctatctcgcagtagcgtgtgcctggttatcccaatactaccaccacacctgtgctttttttatcttgtacgtgcatgtatgcgtatgttttctttttttccgttggtgcttattcgctaccgtctcgttgatccatgaatcacaaacacaagccggttctgcttactatacaaaatag

SEQ ID NO: 10640 - DNA, 399 bp, Artificial Sequence
  Description of Artificial Sequence: Synthetic polynucleotide
atggtttttgttttccccttcccatttttttcttatggtttttccagttttttggaagccggaaaaaaggcaagctacaaaatgtactacgcggagccagaattaaaaaccacgagaacgggaagagccgtggcttgtgacgccggatccccgcgtataatccgtgtcacgttgaaggacaaaatcggtttatccgagagatttacgggaagggtcttttgctatctcgcagtagcgtgtgcctggttatcccaatactaccaccacacctgtgctttttttatcttgtacgtgcatgtatgcgtatgttttctttttttccgttggtgcttattcgctaccgtctctttgatccatgaatctcaaacacaagccggttctgcttactatacaaaatga

SEQ ID NO: 10641 - DNA, 1485 bp, Saccharomyces cerevisiae
atgactaactggcagcaacagcttcctttaacagatacacagaaaaatgaactcgataaaagtgtcctccgatatttgaattggaattacaaacaaactgtacgacatgagcatgctcaagattacgaaagtgttcgacatgcaattgtaactctatcaggttttctgttgcaagaatcagtggaccggcaagaattcatcagtaacaatgacaccagtaacgaaagtatggtagacattgatgaattactgctaccgaagaagtggaactcaattgttagactacaaaaaaaaatcattgaattggagcagaatacagagacccttgtatctcagattaaagatttgaacactcaagtgtcagaactagcacaattcaaacctaccaccagtaacggcaccagcgcacataatgttttgaaatggataccgagaaatctaccaagctgtttaattaatgttgaatcatctgtcacttccgtcaaactacatcccaatttgcctatagtgtttgtggccacagatcatggcaaattatacgcatttgatttatttaactacaccatccctctggcatccttgcaaagtcataccaaggcaattacctccatggatgttttatttaccaattatacgaactccagcaagaagaactatttggtgatcgttaccgcgtctaaagatttgcagattcatgttttcaagtgggtctccgaggaatgcaagttccaacaaattaggtctttattgggccatgagcatattgtctctgcggtaaaaatctggcagaaaaataatgatgtccatatagcgtcctgttccagagatcaaactgttaaaatttgggacttccacaatggttggtcgttgaaaacatttcagcctcattcccaatgggttcgttccatagacgttctaggcgattacatcatctctggttcacatgacactacattaaggttaacacattggccatcaggtaatggtcttagtgttggcacgggtcatgaatttcccatagagaaagttaaatttattcatttcatcgaagactctccggagataaggtttagaacaccatcaacggatcgatataagaattgggggatgcaatattgtgtctcagcgtcaagagatagaacgataaaaatctgggagatacctctacctacgttaatggcccatagagcacccataccgaatcctacagattcaaatttcagatgtgttcttacgttgaaggggcatctttcgtgggttagagatattagtattcgaggccaatacttgttttcttgtgctgatgataaatctgtcagatgttgggatctgaacacggggcagtgcttacacgtttgggaaaagttgcatacaggatttgtcaactgtttagacctggatgtggatttcgattctaacgttaccccaaggcaaatgatggtcactggtggattggattgcaagtctaacgttttcatgagataa

SEQ ID NO: 10642 - DNA, 1485 bp, Artificial Sequence
  Description of Artificial Sequence: Synthetic polynucleotide
atgactaactggcagcaacagcttcctttaacagatacacagaaaaatgaactcgataaaagtgtcctcagatatttgaattggaattacaaacaaactgtaagacatgagcatgctcaagattacgaaagtgttcgccatgcaattgtaactttatctggttttttattgcaagaatctgtggacagacaagaattcatcagtaacaatgacaccagtaacgaaagtatggtagacattgatgaattattattaccgaagaagtggaactctattgttagattacaaaaaaaaatcattgaattggagcagaatacagagacccttgtatctcagattaaagatttgaacactcaagtgtctgaattggcacaattcaaacctaccaccagtaacggcaccagcgcacataatgttttgaaatggataccgagaaatttaccaagctgtttaattaatgttgaaagctctgtcacttccgtcaaattgcatcccaatttgcctatagtgtttgtggccacagatcatggcaaattatacgcatttgatttatttaactacaccatccctttggcatccttgcaaagtcataccaaggcaattacctccatggatgttttatttaccaattatacgaactccagcaagaagaactatttggtgatcgttaccgcgtctaaagatttgcagattcatgttttcaagtgggtctccgaggaatgcaagttccaacaaattaggtctttattgggccatgagcatattgtctctgcggtaaaaatctggcagaaaaataatgatgtccatatagcgtcctgttccagagatcaaactgttaaaatttgggacttccacaatggttggtctttgaaaacatttcagcctcattcccaatgggttcgttccatagacgttttaggcgattacatcatctctggttctcatgacactacattaaggttaacacattggccatctggtaatggtcttagtgttggcacgggtcatgaatttcccatagagaaagttaaatttattcatttcatcgaagactctccggagataaggtttagaacaccatctacggatagatataagaattgggggatgcaatattgtgtctctgcgtccagagatagaacgataaaaatctgggagatacctttgcctacgttaatggcccatagagcacccataccgaatcctacagattctaatttcagatgtgttcttacgttgaaggggcatctttcttgggttagagatattagtattagaggccaatacttgttttcttgtgctgatgataaatctgtcagatgttgggatttgaacacggggcagtgcttacacgtttgggaaaagttgcatacaggatttgtcaactgtttagacttggatgtggatttcgattctaacgttaccccaaggcaaatgatggtcactggtggattggattgcaagtctaacgttttcatgagatga

SEQ ID NO: 10643 - DNA, 2523 bp, Saccharomyces cerevisiae
atggcagagaaggaggaagcgatttttcgctctgctgaaatggctttagtccaattctatattcctcaagaaatttcaagagactctgcttacactttaggtcaattgggtcttgttcaattccgtgacttgaactctaaggtgcgtgcgtttcaaagaactttcgtgaacgaaattagaagactggataatgtagaaagacagtatcgttacttttattctcttttgaagaaacacgatattaagctctacgaaggagacacggacaaatatttggacggctcaggtgaattgtacgttccaccaagcggttcagtgatagatgattatgtccggaacgcttcatatttggaagaaagattgattcaaatggaggatgcaaccgatcaaattgaagtccagaaaaatgacttggaacagtatcgctttattttgcagtcaggtgatgaatttttcttgaagggtgataataccgacagcacttcctatatggatgaagacatgatcgacgctaatggggaaaacattgctgctgctatcggtgcttctgtaaactatgtcactggtgtcattgctagagacaaagttgccaccttagaacaaattctttggagagtattaagaggtaaccttttcttcaaaactgttgaaattgaacaacctgtttatgatgtcaaaaccagggagtataaacataaaaatgcttttatcgtattttctcacggtgatctgattattaaaagaatcagaaagattgcggaatcattggatgccaatctttacgatgttgactcttccaacgagggtagatcacaacaattggccaaggtcaacaagaatttgagtgatttgtacacagttttgaaaaccacttctaccactttagaaagtgaattatatgccattgccaaagaattggactcttggttccaagatgttacccgtgaaaaggcgatttttgaaattttgaacaagtctaactatgataccaatagaaagattttgattgctgaaggttggataccaagagacgaattggctactttgcaagctcgtcttggtgaaatgatcgcaagattgggtattgatgtcccatccattatccaagtcctggatacaaaccacactccacctaccttccacagaactaacaagtttactgctggtttccaaagtatctgtgactgttacggtattgctcagtacagagaaatcaatgctggtttacccacaattgtcactttccctttcatgtttgccatcatgtttggtgatatgggtcacgggttcttaatgaccttagccgcattgtctcttgtattgaatgaaaagaaaatcaacaaaatgaaaagaggcgaaattttcgatatggccttcactggtagatacattattttgttgatgggtgtcttttccatgtacacaggtttcctttacaacgatatcttctctaaaactatgactattttcaagtctggttggaaatggcctgatcattggaaaaaaggtgagagtattactgctacatcggtgggtacataccctatcggtttagattgggcttggcatggaactgaaaatgctttgttattttctaattcttacaaaatgaaactatcaattttaatggggttcatccacatgacctattcttatttcttttcgttggctaaccacctatactttaactctatgattgatatcatcggtaactttattcctggtttgctatttatgcaaggtatctttggttatctttccgtttgtattgtttacaaatgggctgttgattgggttaaggacggaaagcctgctccaggtttgttaaatatgttgatcaacatgtttttatcaccaggaactattgacgatgaattataccctcatcaagcaaaggtccaagtgtttttgttgttgatggccttggtttgtattccttggttgctattggtgaagccattacatttcaaattcactcataaaaagaaatctcacgaaccactgccatcgactgaagcagatgctagttctgaagatttggaagcacaacaattaatttccgcgatggacgccgatgacgctgaagaagaagaagttggttctggatctcatggtgaagactttggtgatattatgattcatcaagttattcatacaattgaattctgtttgaattgtgtttcgcacactgcatcctatttacgtttatgggccttatcattggcacatgctcaattgtctagtgttttatggacaatgacaattcaaattgcctttggatttagaggatttgtgggtgtgtttatgacggttgcactttttgccatgtggttcgcactaacatgtgcagttcttgttttgatggaaggtacatctgccatgcttcattccttacgtttgcactgggttgaatctatgtccaagtttttcgtgggtgaaggtttaccatacgaaccattcgcatttgagtataaagacatggaagtcgctgttgctagtgcaagctcttccgcttcaagctaa

SEQ ID NO: 10644 - DNA, 2523 bp, Artificial Sequence
  Description of Artificial Sequence: Synthetic polynucleotide
atggcagagaaggaggaagcgatttttcgctctgctgaaatggctttagtccaattctatattcctcaagaaatttctagagactctgcttacactttaggtcaattgggtcttgttcaattccgtgacttgaactctaaggtgcgtgcgtttcaaagaactttcgtgaacgaaattagaagattagataatgtagaaagacagtatcgttacttttattctcttttgaagaaacacgatattaagctctacgaaggagacacggacaaatatttggacggcagtggtgaattgtacgttccaccaagcggttctgtgatagatgattatgtcagaaacgcttcttatttggaagaaagattgattcaaatggaggatgcaaccgatcaaattgaagtccagaaaaatgacttggaacagtatcgctttattttgcagtctggtgatgaatttttcttgaagggtgataataccgacagcacttcctatatggatgaagacatgatcgacgctaatggggaaaacattgctgctgctatcggtgcttctgtaaactatgtcactggtgtcattgctagagacaaagttgccaccttagaacaaattctttggagagtattaagaggtaaccttttcttcaaaactgttgaaattgaacaacctgtttatgatgtcaaaaccagggagtataaacataaaaatgcttttatcgtattttctcacggtgatttgattattaaaagaatcagaaagattgcggaatctttggatgccaatctttacgatgttgactcttccaacgagggtagatctcaacaattggccaaggtcaacaagaatttgagtgatttgtacacagttttgaaaaccacttctaccactttagaaagtgaattatatgccattgccaaagaattggactcttggttccaagatgttacccgtgaaaaggcgatttttgaaattttgaacaagtctaactatgataccaatagaaagattttgattgctgaaggttggataccaagagacgaattggctactttgcaagctcgtcttggtgaaatgatcgcaagattgggtattgatgtcccatccattatccaagtcttggatacaaaccacactccacctaccttccacagaactaacaagtttactgctggtttccaaagtatctgtgactgttacggtattgctcagtacagagaaatcaatgctggtttacccacaattgtcactttccctttcatgtttgccatcatgtttggtgatatgggtcacgggttcttaatgaccttagccgcattgtctcttgtattgaatgaaaagaaaatcaacaaaatgaaaagaggcgaaattttcgatatggccttcactggtagatacattattttgttgatgggtgtcttttccatgtacacaggtttcctttacaacgatatcttctctaaaactatgactattttcaagtctggttggaaatggcctgatcattggaaaaaaggtgagagtattactgctacatctgtgggtacataccctatcggtttagattgggcttggcatggaactgaaaatgctttgttattttctaattcttacaaaatgaaattatccattttaatggggttcatccacatgacctattcttatttcttttctttggctaaccacttgtactttaactctatgattgatatcatcggtaactttattcctggtttgttatttatgcaaggtatctttggttatctttccgtttgtattgtttacaaatgggctgttgattgggttaaggacggaaagcctgctccaggtttgttaaatatgttgatcaacatgtttttatctccaggaactattgacgatgaattataccctcatcaagcaaaggtccaagtgtttttgttgttgatggccttggtttgtattccttggttgttgttggtgaagccattacatttcaaattcactcataaaaagaaatctcacgaaccattaccatctactgaagcagatgctagttctgaagatttggaagcacaacaattaatttccgcgatggacgccgatgacgctgaagaagaagaagttggttctggatctcatggtgaagactttggtgatattatgattcatcaagttattcatacaattgaattctgtttgaattgtgtttctcacactgcatcctatttacgtttatgggccttatctttggcacatgctcaattgtctagtgttttatggacaatgacaattcaaattgcctttggatttagaggatttgtgggtgtgtttatgacggttgcactttttgccatgtggttcgcattaacatgtgcagttcttgttttgatggaaggtacatctgccatgcttcattccttacgtttgcactgggttgaatctatgtccaagtttttcgtgggtgaaggtttaccatacgaaccattcgcatttgagtataaagacatggaagtcgctgttgctagtgcaagctcttccgcttctagctga

SEQ ID NO: 10645 - DNA, 984 bp, Saccharomyces cerevisiae
atggcatcatcagtcccagggcccatcgatttgcccgaatcccgctatgacttatccacgtattggggtagaatccgccattgcgcagagatttccgaccccactatgttgttaactactgagaaggacctggcgcatgctagagaaatcatcagtgcgtatcgtcacggtgaactaaaagagactactccggagttctggcgagccaagaaacaactggactccaccgtgcatccggacacagggaagacagttcttttgcccttccgtatgtcttccaacgtgctatcaaacctagtcgttactgtaggtatgctgacgcctggtttgggtacggcagggactgtattttggcaatgggcaaatcaatcgctaaacgtcgccgttaattccgctaacgcaaacaaatctcatcctatgtccacgtcccaattgctcaccaattacgctgccgctgtaactgcgtcgtgtggtgttgcgttaggtctaaataacctagttcccaggttgaaaaacatttctccacattcaaagttgatcttgggccgtttggtgccatttgccgccgtggtcagtgccggtattgtcaacgtcttcctaatgagaggcaacgaaattagaaagggtatttctgtgtttgactctaacggtgacgaagtcggaaagtccaagaaggctgccttcatggcagttggtgaaactgcattaagtagagtgattaacgccactccaactatggtcatcccacctttgattttggttagactacaacgcggtgtcctcaaaggtaagtctctcggtgtgcaaactttggccaatttggggttgatctcagtcacaatgttctcagctttgccatttgcactcggtatcttccctcaaagacaagcaatccatttaaataaactagaacctgaactacatggcaagaaggataaggatgggaagccaattgaaaaggtctattttaacagaggtatttag

SEQ ID NO: 10646 - DNA, 984 bp, Artificial Sequence
  Description of Artificial Sequence: Synthetic polynucleotide
atggcatcttctgtcccagggcccatcgatttgcccgaatcccgctatgacttatccacgtattggggtagaatccgccattgcgcagagatttccgaccccactatgttgttaactactgagaaggacttggcgcatgctagagaaatcatcagtgcgtatcgtcacggtgaattgaaagagactactccggagttctggagagccaagaaacaattggactccaccgtgcatccggacacagggaagacagttcttttgcccttccgtatgtcttccaacgtgctttccaacttggtcgttactgtaggtatgcttacgcctggtttgggtacggcagggactgtattttggcaatgggcaaatcaatctttgaacgtcgccgttaattccgctaacgcaaacaaatctcatcctatgtccacgtcccaattgctcaccaattacgctgccgctgtaactgcgtcttgtggtgttgcgttaggtttgaataacttggttcccaggttgaaaaacatttctccacattctaagttgatcttgggccgtttggtgccatttgccgccgtggtcagtgccggtattgtcaacgtcttcttaatgagaggcaacgaaattagaaagggtatttctgtgtttgactctaacggtgacgaagtcggaaagtccaagaaggctgccttcatggcagttggtgaaactgcattaagtagagtgattaacgccactccaactatggtcatcccacctttgattttggttagattacaacgcggtgtcctcaaaggtaagtctctcggtgtgcaaactttggccaatttggggttgatctctgtcacaatgttcagtgctttgccatttgcactcggtatcttccctcaaagacaagcaatccatttaaataaattagaacctgaattacatggcaagaaggataaggatgggaagccaattgaaaaggtctattttaacagaggtatttga

SEQ ID NO: 10647 - DNA, 1383 bp, Saccharomyces cerevisiae
atgacagaagataaatcgcaggttaaaatcaggtttttcacgcgtgagaaagatgaattactacatgtacaagatactccaatgtacgcccccatctcattaaagagatatgggttgtccgaaattgtcaatcacttgttgggctcggaaaagcctgttcctttcgatttcttgattgaaggtgaattgttacgtacttcattgcacgactatttgaccaagaaaggtttatcgagcgaagcctcgctgaatgtagaatataccagggcaattcttccaccatcctatttgaatagtttcagcaatgaggactgggttagctcattggatgtcggcgacggttccaagcatattattagtggttcttacgatggtatagttcgcacctgggatttatcaggtaatgtgcaaaagcagtacagtggtcattctggcccaatccgtgcagtaaaatacatttccaatacaaggctagtttcggctggtaacgaccgtactttgagattatggaaaaccaaaaacgatgatttgaaattaacttcacaacaacaggcacaggaagacgatgatgacgaagtaaacatagaggacggtaagacactggctatcttggaaggtcataaggcaccagtagtctctattgatgtttcagacaactcaagaatattatctgcatcatacgacaattctattgggttctggtctactatttataaggaaatgacagttgttgatccattagaagatataaacaatccaaacaataaaatatccactgctgctagaaaaaggagaaaattgacaatgaaagatggtaccattagaagacgtgcccctctgtctctgttagaatcccatacagctcctgttgagcaagtgatcttcgattctacagataataccgttggttattcagtatcacaagatcataccatcaagacatgggatttggtcaccgcgagatgtatagatacaagaacaacatcgtactcgttgctttccattgctcaattgtcgactttgaacttgttagcatgtgggtccagcgccagacacatcacattgcatgacccacgtgtgggagcgtcttccaaagttactcagcaacaactaattggtcataagaacttcgtttcctctctggacacttgtcccgagaatgagtatatattatgctcgggttctcacgatggtaccgtgaaggtatgggacgtcaggtctacttctccgatgtacaccataacaagagaagacaaatcggtccaaaagggcgtcaatgacaaagtttttgctgtcaaatgggctgaaaaagtgggtattatcagcgctggtcaagacaaaaagattcaaataaataaaggagacaacattttcaaaaactga

SEQ ID NO: 10648 - DNA, 1383 bp, Artificial Sequence
  Description of Artificial Sequence: Synthetic polynucleotide
atgacagaagataaatctcaggttaaaatcaggtttttcacgcgtgagaaagatgaattattacatgtacaagatactccaatgtacgcccccatctctttaaagagatatgggttgtccgaaattgtcaatcacttgttgggctctgaaaagcctgttcctttcgatttcttgattgaaggtgaattgttacgtacttctttgcacgactatttgaccaagaaaggtttatccagcgaagccagtttgaatgtagaatataccagggcaattcttccaccatcctatttgaatagtttcagcaatgaggactgggttagctctttggatgtcggcgacggttccaagcatattattagtggttcttacgatggtatagttcgcacctgggatttatctggtaatgtgcaaaagcagtacagtggtcattctggcccaatccgtgcagtaaaatacatttccaatacaaggttggtttctgctggtaacgaccgtactttgagattatggaaaaccaaaaacgatgatttgaaattaacttctcaacaacaggcacaggaagacgatgatgacgaagtaaacatagaggacggtaagacattggctatcttggaaggtcataaggcaccagtagtctctattgatgtttctgacaactctagaatattatctgcaagctacgacaattctattgggttctggtctactatttataaggaaatgacagttgttgatccattagaagatataaacaatccaaacaataaaatatccactgctgctagaaaaaggagaaaattgacaatgaaagatggtaccattagaagacgtgcccctttatctttattagaatcccatacagctcctgttgagcaagtgatcttcgattctacagataataccgttggttattctgtatctcaagatcataccatcaagacatgggatttggtcaccgcgagatgtatagatacaagaacaacatcttactctttgctttccattgctcaattgtctactttgaacttgttagcatgtgggtccagcgccagacacatcacattgcatgacccacgtgtgggagcgtcttccaaagttactcagcaacaattgattggtcataagaacttcgtttcctctttggacacttgtcccgagaatgagtatatattatgctctggttctcacgatggtaccgtgaaggtatgggacgtcaggtctacttctccgatgtacaccataacaagagaagacaaatctgtccaaaagggcgtcaatgacaaagtttttgctgtcaaatgggctgaaaaagtgggtattatcagcgctggtcaagacaaaaagattcaaataaataaaggagacaacattttcaaaaactga

SEQ ID NO: 10649 - DNA, 1980 bp, Saccharomyces cerevisiae
atgccttcttctttgacaaaaaccgaatctaactcagatcctcgaacaaacatacagcaggtaccaaaagccttggacaaaaatgtaactaatagcggcaacttggattcgacttcttcttcgacagggtcaataacagaggacgaaaaaagatcagaaccgaatgcagattccaataacatgacagggggcgagccaattgacccaagagatctcgattgggacgggcccgatgacccagacaatccgcataattggtcctctttgaagaaatggtatactactatgacttcagcttttctttgtttggtcgtcacaatgggtagttccctatatgtttcttccgtaccagaattggtagaaagatatcacgttagtcagactttggcgcttgctggtttaactttctatcttctgggtttatcgactgtcatcggcgctccattaagtgaagtgtttggtcgtaagcctgtctatttattttccctacctgtgtcaatgcttttcaccatgggtgttgggttatccaatggccacatgagaataattctacccctaaggtttttatcaggtgtctttgcatcccccgccttatccgttggatcaggtaccatcctggatatctttgacgtggaccaggtctccgtcgcaatgacatactttgttctatctccattcttagggccagttttatctcctattatggcaggatttgctactgaagccaaaggctggcgttggtctgaatggatccaattgattgcgggcggtctaatcttgccatttattgcgctcatgccagagacccataaaggtattattttaagaaagcgtgccaagaagagaaatatagccttgaagaagttcagcagggaagctcagaaagaatttttaaaaaccactgtcactattacaatcttaaggcctttaaaaatgcttgtcgttgaacctattgtatttgttttcagtgtttatgtcgctttcatattcgccattttatttggatttttcgaagcatacgctgtcatttatcgtggtgtttaccacatgtctatggggatatctggcttgccatttattggtattggtgtcgggttatggataggtgctttcttttacctttacatcgacagaaaatatctcttccctaaaccaccagctggcactcaaccactcaccgaaaaagagagaacttctaaaaggactaccccttacagaggtgcaagagacgctgaaacaggtgaattgctacccgttgttccagaaaaatttttaattgcctgtaaatttggttctgtagctttgcctatcggcctgttttggcaagcctggactgctagatcagatgtccactggatggctcctgtggctgccggtgtgccatttggttttggtttaattttgatttttttcagcgttttaatgtacttctctacatgctatccgccattaactgtggcatcctgtttggctgccaataatctattaagatacgttatgagtagtgtattcccattgtttaccatccaaatgtacacaaagatgaaaatcaaatgggcaagcactttatttgcattagtttgcgttgtgatgattccaattccatgggtttttgaaaaatgggggagcaaattaagacacaagtcacaatttggttatgccgccatggaaaaggaggctgagaccgaaggtggtatagatgacgtaaatgctgtcgatggtgaattgaatctaacaaggatgaccacgttaaggaccatggaaacagacccttcgactagagaaaaaccaggtgaaaggctatctctgcgcaggacccatacgcagcccgttcctgcctcgtttgatcgcgaggacgggcaacatgcgcaaaatcgtaatgaacccatttccaatagtttatactcagctatcaaggataatgaagacggttattcgtatacggaaatggccaccgatgcttccgccagaatggtttga

SEQ ID NO: 10650 - DNA, 1980 bp, Artificial Sequence
  Description of Artificial Sequence: Synthetic polynucleotide
atgccttcttctttgacaaaaaccgaatctaacagtgatcctagaacaaacatacagcaggtaccaaaagccttggacaaaaatgtaactaatagcggcaacttggattctacttcttcttctacagggtccataacagaggacgaaaaaagaagtgaaccgaatgcagattccaataacatgacagggggcgagccaattgacccaagagatctcgattgggacgggcccgatgacccagacaatccgcataattggtcctctttgaagaaatggtatactactatgactagtgcttttctttgtttggtcgtcacaatgggtagttccttatatgtttcttccgtaccagaattggtagaaagatatcacgttagtcagactttggcgcttgctggtttaactttctatcttttgggtttatctactgtcatcggcgctccattaagtgaagtgtttggtcgtaagcctgtctatttattttccttacctgtgtccatgcttttcaccatgggtgttgggttatccaatggccacatgagaataattttgcccttgaggtttttatctggtgtctttgcatcccccgccttatccgttggatctggtaccatcttagatatctttgacgtggaccaggtctccgtcgcaatgacatactttgttttatctccattcttagggccagttttatctcctattatggcaggatttgctactgaagccaaaggctggcgttggtctgaatggatccaattgattgcgggcggtttgatcttgccatttattgcgctcatgccagagacccataaaggtattattttaagaaagcgtgccaagaagagaaatatagccttgaagaagttcagcagggaagctcagaaagaatttttaaaaaccactgtcactattacaatcttaaggcctttaaaaatgcttgtcgttgaacctattgtatttgttttcagtgtttatgtcgctttcatattcgccattttatttggatttttcgaagcatacgctgtcatttatcgtggtgtttaccacatgtctatggggatatctggcttgccatttattggtattggtgtcgggttatggataggtgctttcttttacctttacatcgacagaaaatatctcttccctaaaccaccagctggcactcaaccactcaccgaaaaagagagaacttctaaaaggactaccccttacagaggtgcaagagacgctgaaacaggtgaattgttgcccgttgttccagaaaaatttttaattgcctgtaaatttggttctgtagctttgcctatcggcttattttggcaagcctggactgctagaagtgatgtccactggatggctcctgtggctgccggtgtgccatttggttttggtttaattttgatttttttcagcgttttaatgtacttctctacatgctatccgccattaactgtggcatcctgtttggctgccaataatttattaagatacgttatgagtagtgtattcccattgtttaccatccaaatgtacacaaagatgaaaatcaaatgggcaagcactttatttgcattagtttgcgttgtgatgattccaattccatgggtttttgaaaaatgggggagcaaattaagacacaagtctcaatttggttatgccgccatggaaaaggaggctgagaccgaaggtggtatagatgacgtaaatgctgtcgatggtgaattgaatttgacaaggatgaccacgttaaggaccatggaaacagacccttccactagagaaaaaccaggtgaaaggttatctttacgcaggacccatacgcagcccgttcctgcctcttttgatcgcgaggacgggcaacatgcgcaaaatcgtaatgaacccatttccaatagtttatactctgctatcaaggataatgaagacggttattcttatacggaaatggccaccgatgcttccgccagaatggtttga

SEQ ID NO: 10651 - DNA, 1287 bp, Saccharomyces cerevisiae
atgctaaagggaccgcttaaaggttgcttaaatatgtctaaaaaagttatagtgattgctggtacaacaggagtaggaaagtctcagttgtccatacaattggcacaaaaatttaatggcgaagttatcaattcggattctatgcaggtatataaagatattcctattataacaaataaacatccgcttcaagaaagagagggcattcctcaccatgtaatgaatcacgtagattggtcagaagaatactattcccatcgttttgaaactgaatgcatgaacgctattgaagatattcaccggaggggtaagatacccatcgttgttgggggtactcattattatttgcagactcttttcaataagcgggtcgatacgaaatcatccgaacgtaagctcacaaggaagcagctcgatattttggaatcgactgaccctgatgtgatttataacacacttgtgaagtgtgatcctgatatagctaccaaataccatcctaatgactacaggagggtacaacgaatgttggaaatctactataagacgggcaaaaaaccaagcgagacatttaacgaacaaaaaataactttgaagtttgataccctatttttatggctatacagtaagccggagccacttttccaaaggcttgacgatcgtgtagacgacatgctagaaagaggcgccttgcaagaaatcaagcaattatatgaatattacagtcaaaataaatttacgccggagcaatgcgagaatggtgtttggcaagttattggcttcaaagaattcttaccgtggctaaccgggaaaactgatgacaacacagtaaaattggaggattgtatagaaagaatgaaaacgagaacacgtcaatacgcaaaaaggcaggtaaaatggatcaagaaaatgctgatacctgacatcaaaggcgatatatacttactggatgccactgacctttctcaatgggacacgaatgcatctcaaagagcgatagctatttccaatgactttattagcaatcgacccatcaagcaagaaagggcacctaaagccctagaggagctgttgtctaaaggcgaaactacgatgaagaaattggacgattggacacattatacttgcaacgtctgtcgtaacgcagatggtaagaacgttgtagctattggcgaaaaatattggaaaattcatttgggtagcagaagacataaatccaacttgaaaagaaacactcgtcaagctgattttgaaaaatggaaaataaacaagaaggagactgtggaatga

SEQ ID NO: 10652 - DNA, 1287 bp, Artificial Sequence
  Description of Artificial Sequence: Synthetic polynucleotide
atgttgaagggaccgcttaaaggttgcttaaatatgtctaaaaaagttatagtgattgctggtacaacaggagtaggaaagtctcagttgtccatacaattggcacaaaaatttaatggcgaagttatcaattctgattctatgcaggtatataaagatattcctattataacaaataaacatccgcttcaagaaagagagggcattcctcaccatgtaatgaatcacgtagattggtctgaagaatactattcccatcgttttgaaactgaatgcatgaacgctattgaagatattcacagaaggggtaagatacccatcgttgttgggggtactcattattatttgcagactcttttcaataagcgtgtcgatacgaaatcttccgaacgtaagctcacaaggaagcagctcgatattttggaatctactgaccctgatgtgatttataacacacttgtgaagtgtgatcctgatatagctaccaaataccatcctaatgactacaggagggtacaaagaatgttggaaatctactataagacgggcaaaaaaccaagcgagacatttaacgaacaaaaaataactttgaagtttgataccttatttttatggttatacagtaagccggagccacttttccaaaggcttgacgatcgtgtagacgacatgttggaaagaggcgccttgcaagaaatcaagcaattatatgaatattacagtcaaaataaatttacgccggagcaatgcgagaatggtgtttggcaagttattggcttcaaagaattcttaccgtggttgaccgggaaaactgatgacaacacagtaaaattggaggattgtatagaaagaatgaaaacgagaacacgtcaatacgcaaaaaggcaggtaaaatggatcaagaaaatgttgatacctgacatcaaaggcgatatatacttattagatgccactgacctttctcaatgggacacgaatgcatctcaaagagcgatagctatttccaatgactttattagcaataggcccatcaagcaagaaagggcacctaaagccttagaggagttattgtctaaaggcgaaactacgatgaagaaattggacgattggacacattatacttgcaacgtctgtcgtaacgcagatggtaagaacgttgtagctattggcgaaaaatattggaaaattcatttgggtagcagaagacataaatccaacttgaaaagaaacactcgtcaagctgattttgaaaaatggaaaataaacaagaaggagactgtggaatga

SEQ ID NO: 10653 - DNA, 1986 bp, Saccharomyces cerevisiae
atgagtgaactgcttgccattccacttaagcgaactttagaagtggactttgccacggagttgtcaaaactaattgatactacttcctttcaaacggcatcctttttccaatcagacatactcaaagttgttgatgcaagaaacaatgcgattgcacccgatatctcaatcgacggtctttctgcactgaaggaatactatgtaatattgttgcaattagagaaaaagtttcccaataatcaaatagaatttacatggtttcaaacgctatcacaaaaatctcgtggtactagtcaatactcattacaatgggaaaaattaaccattatttataatattggttgcatgtattcactgttggctctaaatagcaacaatgatgcagccgaatccctcaaaacgtcatgtctgtacttccagaatgccgccggatgctttaaacatgttttagaccaccaaaaaaatcttgagacaatcccagtggtagatgacgccacattgaacgctttaacctccctgatgctagcacaagcgcaagaatgcttctggtttaaagccgtgcaagataaacacaaggactccttaatcgcgaagttgtcacaacagatcgtggacttctactgcgaggctattaatgacgcccaaagggggaaacttattagaagtgattggataaaccacttaaaggctaaaaaggcttactttagtgcggtgacttattacagaatagccttatcttttaatgagaagaagcagttcggaaatgttgtgaaagctctgcaaatgggattgcaatttataaatgaatcaacactatcttcgcaagctaagtttaaaactgttgtcgaatcttctctgaaagaagcccaaagagacaatgaattcatctacttacaagaagttccttcggaattaccatcgatcaaaccagctctcatggttaaaccatcttcttcagcaacattgttgccttctattaaaaaggatgagactttattcaaagacctaatccctatagaagtgatggaatattgcacagcatacaatgaaaggcaagatgaatacgttgaacaacgtgttaccaatccccttgcttccctaaataaactattgaaggagtccttgactactttccaaataccacaagggcttacaaaggtgagtgaagcagaactgagtcattaccaggcatcactgaataatcttctcattaataataaaaatgtgcaggtacaactcgataacattgagcaaattttaaatgaagaagcatttactgacaatcagctccgactaaaacacggaaccttaaattggactttacccgaatcttcaactactaacacagcatattatgaaaaactaaaaaagctgagaggataccttgatgaaggtagtgcgattgacaaacaaacaaatgaactatttcaaagcatcgataaaaatttgattggatcagagatcaggttaccggaatctaatgatcctctaacgaataagattaagatgatcatacaggaaagaaatgattatattgataggacgaggcggaaatcttcagaatatagaatacttccaaagatcattacatcgtataaaaaaaatggaacagtcgactttgaacccattttcataggccatttaaaatactttgacgaagatttaagatacgttaatagtacaaaggaagaaaatatcaaacttattgaggaagtaaacctaagtaagaagaataaccccggcagaagcgggattgaaccaaagaaaatggtaagaatagatcccagagagctatatattgaagatctgagatattccttcaaactgcttgatgaggtgaaagaaaatttaagtgccggcacagcattttacgaaaatttaattacttctaccagcaatctgtacaatgaggtacaggaatatgatacagcaagaagagcagaaaaagctaggcttgataagagtttgacatttgaagaccaatga

SEQ ID NO: 10654 - DNA, 1986 bp, Artificial Sequence
  Description of Artificial Sequence: Synthetic polynucleotide
atgagtgaattgcttgccattccacttaagagaactttagaagtggactttgccacggagttgagtaaattgattgatactacttcctttcaaacggcatcctttttccaatctgacatactcaaagttgttgatgcaagaaacaatgcgattgcacccgatatctccatcgacggtctttctgcattgaaggaatactatgtaatattgttgcaattagagaaaaagtttcccaataatcaaatagaatttacatggtttcaaacgttatctcaaaaatctcgtggtactagtcaatactctttacaatgggaaaaattaaccattatttataatattggttgcatgtattctttgttggctttgaatagcaacaatgatgcagccgaatccctcaaaacgtcctgtctttacttccagaatgccgccggatgctttaaacatgttttagaccaccaaaaaaatcttgagacaatcccagtggtagatgacgccacattgaacgctttaacctccttgatgttagcacaagcgcaagaatgcttctggtttaaagccgtgcaagataaacacaaggactccttaatcgcgaagttgtctcaacagatcgtggacttctactgcgaggctattaatgacgcccaaagggggaaacttattagaagtgattggataaaccacttaaaggctaaaaaggcttactttagtgcggtgacttattacagaatagccttatcttttaatgagaagaagcagttcggaaatgttgtgaaagctttacaaatgggattgcaatttataaatgaatctacattatcttctcaagctaagtttaaaactgttgtcgaatcttctttgaaagaagcccaaagagacaatgaattcatctacttacaagaagttccttctgaattaccatccatcaaaccagctctcatggttaaaccatcttcttctgcaacattgttgccttctattaaaaaggatgagactttattcaaagacttgatccctatagaagtgatggaatattgcacagcatacaatgaaaggcaagatgaatacgttgaacaacgtgttaccaatccccttgcttccttgaataaacttttgaaggagtccttgactactttccaaataccacaagggcttacaaaggtgagtgaagcagaattaagtcattaccaggcatctttgaataatcttctcattaataataaaaatgtgcaggtacaactcgataacattgagcaaattttaaatgaagaagcatttactgacaatcagctcagattgaaacacggaaccttaaattggactttacccgaatcttctactactaacacagcatattatgaaaaattgaaaaagttgagaggataccttgatgaaggtagtgcgattgacaaacaaacaaatgaattatttcaaagcatcgataaaaatttgattggatctgagatcaggttaccggaatctaatgatcctttgacgaataagattaagatgatcatacaggaaagaaatgattatattgataggacgaggagaaaatcttctgaatatagaatacttccaaagatcattacatcttataaaaaaaatggaacagtcgactttgaacccattttcataggccatttaaaatactttgacgaagatttaagatacgttaatagtacaaaggaagaaaatatcaaacttattgaggaagtaaacttgagtaagaagaataaccccggcagaagcgggattgaaccaaagaaaatggtaagaatagatcccagagagttgtatattgaagatttgagatattccttcaaattacttgatgaggtgaaagaaaatttaagtgccggcacagcattttacgaaaatttaattacttctaccagcaatctttacaatgaggtacaggaatatgatacagcaagaagagcagaaaaagctaggcttgataagagtttgacatttgaagaccaatga

SEQ ID NO: 10655 - DNA, 486 bp, Saccharomyces cerevisiae
atgatcaagtatactatcgatgagctttttcaactgaagccaagtttaactttggaagttaatttcgatgcggtggaatttagagccatcattgaaaaagttaagcaattgcaacacttgaaagaggaagagtttaacagtcatcatgttggtcatttcggtcgtagaagatcttcccaccatcatggtagaccaaagattaagcacaacaagcctaaggttacaaccgattcagatggttggtgcacatttgaagccaagaagaagggtagtggagaagatgatgaagaagaaacagaaaccacaccaacttctactgtgccagttgctaccattgcccaagaaactttaaaagtcaagccaaataacaaaaatatttcttccaacagacctgctgataccagagatattgttgcggacaagccaattcttggtttcaacgcatttgctgctttggaaagtgaagacgaagacgacgaagcataa

SEQ ID NO: 10656 - DNA, 486 bp, Artificial Sequence
  Description of Artificial Sequence: Synthetic polynucleotide
atgatcaagtatactatcgatgagctttttcaattgaagccaagtttaactttggaagttaatttcgatgcggtggaatttagagccatcattgaaaaagttaagcaattgcaacacttgaaagaggaagagtttaacagtcatcatgttggtcatttcggtcgtagaagatcttcccaccatcatggtagaccaaagattaagcacaacaagcctaaggttacaaccgattctgatggttggtgcacatttgaagccaagaagaagggtagtggagaagatgatgaagaagaaacagaaaccacaccaacttctactgtgccagttgctaccattgcccaagaaactttaaaagtcaagccaaataacaaaaatatttcttccaacagacctgctgataccagagatattgttgcggacaagccaattcttggtttcaacgcatttgctgctttggaaagtgaagacgaagacgacgaagcatga

SEQ ID NO: 10657 - DNA, 828 bp, Saccharomyces cerevisiae
atgtctagtcgtaaaaaagtcagagtattactgctcaagaataaaactgtccccattgataaatatgaattggagtgtaggagtaaggcgtttgaacccatattcgtaccgcttattaaacatacacatgtaattcaagattttagaaatgttttgaataccatcccaaactatttgaatactatcaattacattattattacctctcaaaggactgtagagtcattgaatgaagcgatcattcccacattgacaagtgaacaaaaagctgcattgctcagtaaaacagtttatactgtaggccctgctactgctaacttcatcagaagatcaggtttcattaatgttaaaggtggagaagacgctggtaatggttcaatccttgctgatataattattgatgacttgagtacggatattaaggcatgcccaccaagtgaactattatttctcgtgggtgaaattagaagagatatcatcccaaagaaactccatagcaagggaataaaagtaagagaagtggttacttataaaactgaagaattaagcgacggttttaaaagattcatacacgccatgaaagaatgcgatgaggatgaagtattctcggactgggtggtagttttcagtccccagggaacgaaagaaattactcagtatttgggtgacagtaaccgcctaccaggttcccatctacgggttgcgtccatcggacctaccactaaaaaatatctggatgataatgatgtaacctctgatgtggtcagtccaaaaccggaccccaagtcgctattagatgctattgaattataccagcgccataaataa

SEQ ID NO: 10658 - DNA, 828 bp, Artificial Sequence
  Description of Artificial Sequence: Synthetic polynucleotide
atgtctagtcgtaaaaaagtcagagtattacttctcaagaataaaactgtccccattgataaatatgaattggagtgtaggagtaaggcgtttgaacccatattcgtaccgcttattaaacatacacatgtaattcaagattttagaaatgttttgaataccatcccaaactatttgaatactatcaattacattattattacctctcaaaggactgtagagtctttgaatgaagcgatcattcccacattgacaagtgaacaaaaagctgcattgctcagtaaaacagtttatactgtaggccctgctactgctaacttcatcagaagatctggtttcattaatgttaaaggtggagaagacgctggtaatggttctatccttgctgatataattattgatgacttgagtacggatattaaggcatgcccaccaagtgaattattatttctcgtgggtgaaattagaagagatatcatcccaaagaaactccatagcaagggaataaaagtaagagaagtggttacttataaaactgaagaattaagcgacggttttaaaagattcatacacgccatgaaagaatgcgatgaggatgaagtattcagtgactgggtggtagttttcagtccccagggaacgaaagaaattactcagtatttgggtgacagtaaccgcttgccaggttcccatttaagagttgcgtccatcggacctaccactaaaaaatatttggatgataatgatgtaacctctgatgtggtcagtccaaaaccggaccccaagtctttattagatgctattgaattataccagcgccataaatga

SEQ ID NO: 10659 - DNA, 933 bp, Saccharomyces cerevisiae
atgagtacaaatacggaaatcataaaaaatagtgatttgcaaagtttaatcaatgataagaggaggttaataaatgaaataaaagactttaataaatccattaaacccttggagtttgaatcgtatcaggattatttcctgataaaaacgttcaaaaaaggaatatctgcaagtggccatgtggatattgacagtttaagaaataaagaatatggaatatactacaagaaaatcaagaggaactctacacaagaagtcggcgaaccaatccctcgcaacacatcctcctcctcctcttctactagatcaaactcatcagctgatatcagcgatacagaatattcaggtgagaacactcctacaactactggtgctgccagtcgaagaagacgtacgagatctcgagctattcaaagagaaaatagtctaccagcatctttaccctcaattagtgaagcgaatgcaaacaatgatgatgttactatttctgaaataaatggaagtgaattgccatttccaattccaatatcagaagtggaaaatattgacattgcttcagatataactgaaagggatggtattagaaggagatcatcaaggatatcagaaagagacaaaagacgttcacagtctagactggggtcagaagaagatgaagaaggcgacggacatgacggagatgaaggggagaccaaaatccaagacctatatgagagtttggtacccaaaattttggagtcacgtagaaggtctgattggatcctccctcctaaggcaagatatacaccagaaaagcaaatgaggaccaaaccgtcattcaagagcataaagattaatgaacttgtcgggaataaaagaatacgaagtatattatctagatttgaaggtggtgtagcgggtatacgcaaaagagattgggactctacccaatag

SEQ ID NO: 10660 - DNA, 933 bp, Artificial Sequence
  Description of Artificial Sequence: Synthetic polynucleotide
atgagtacaaatacggaaatcataaaaaatagtgatttgcaaagtttaatcaatgataagaggaggttaataaatgaaataaaagactttaataaatccattaaacccttggagtttgaaagttatcaggattatttcttgataaaaacgttcaaaaaaggaatatctgcaagtggccatgtggatattgacagtttaagaaataaagaatatggaatatactacaagaaaatcaagaggaactctacacaagaagtcggcgaaccaatccctcgcaacacatcctcctcctcctcttctactagatctaactcttctgctgatatcagcgatacagaatattctggtgagaacactcctacaactactggtgctgccagtagaagaagacgtacgagatctagagctattcaaagagaaaatagtttaccagcatctttaccctctattagtgaagcgaatgcaaacaatgatgatgttactatttctgaaataaatggaagtgaattgccatttccaattccaatatctgaagtggaaaatattgacattgcttctgatataactgaaagggatggtattagaaggagaagttctaggatatctgaaagagacaaaagacgttctcagtctagattagggagtgaagaagatgaagaaggcgacggacatgacggagatgaaggggagaccaaaatccaagacctttatgagagtttggtacccaaaattttggagtctcgtagaaggtctgattggatcctccctcctaaggcaagatatacaccagaaaagcaaatgaggaccaaaccgtccttcaagagcataaagattaatgaacttgtcgggaataaaagaataagaagtatattatctagatttgaaggtggtgtagcgggtatacgcaaaagagattgggactctacccaatga

SEQ ID NO: 10661 - DNA, 801 bp, Saccharomyces cerevisiae
atgagtgaaaagaagaaagttctaatgctacatggttttgtccaatccgataagatattttctgcgaagactggaggattacgaaagaatttgaagaagttaggttacgatttatactatccttgcgccccacattcaattgataaaaaagcgttattccaatcagagtcagaaaagggtagagatgctgcgaaggaattcaacacctcagcgactagtgatgaagtatacgggtggttctttagaaatcccgaatctttcaattcctttcaaatagatcaaaaggtgtttaactatttacgtaactacgtgctagaaaatggaccatttgatggtgtcattggattcagccaaggtgcaggtcttgggggctacttagtcactgactttaacagaatattaaatcttactgatgaacaacagcccgctttaaaattttttatttcatttagtggattcaaattagaagatcaatcctaccagaaagaatatcataggattatccaggtgccctctctacatgtaaggggggagttagatgaagttgtagcagaatctagaatcatggcattgtacgagtcatggcccgataacaaaaggacattgttggttcatcctggagcccattttgtcccaaactcgaaaccattcgtatcccaagtttgcaattggatccaaggaattactagcaaagagggtcaagagcataatgcccaacctgaagtagatcggaaacaatttgacaaacctcaattggaagatgatttgttagatatgatcgattccttgggtaaattgtaa

SEQ ID NO: 10662 - DNA, 801 bp, Artificial Sequence
  Description of Artificial Sequence: Synthetic polynucleotide
atgagtgaaaagaagaaagttttgatgttgcatggttttgtccaatccgataagatattttctgcgaagactggaggattaagaaagaatttgaagaagttaggttacgatttatactatccttgcgccccacattctattgataaaaaagcgttattccaaagtgagagtgaaaagggtagagatgctgcgaaggaattcaacacctctgcgactagtgatgaagtatacgggtggttctttagaaatcccgaatctttcaattcctttcaaatagatcaaaaggtgtttaactatttacgtaactacgtgttggaaaatggaccatttgatggtgtcattggattcagccaaggtgcaggtcttgggggctacttagtcactgactttaacagaatattaaatcttactgatgaacaacagcccgctttaaaattttttatttcctttagtggattcaaattagaagatcaatcctaccagaaagaatatcataggattatccaggtgccctctttgcatgtaaggggggagttagatgaagttgtagcagaatctagaatcatggcattgtacgagagttggcccgataacaaaaggacattgttggttcatcctggagcccattttgtcccaaactccaaaccattcgtatcccaagtttgcaattggatccaaggaattactagcaaagagggtcaagagcataatgcccaacctgaagtagataggaaacaatttgacaaacctcaattggaagatgatttgttagatatgatcgattccttgggtaaattgtga

SEQ ID NO: 10663 - DNA, 861 bp, Saccharomyces cerevisiae
atgcagaatgaaccaatgtttcaggtccaggtggacgaatctgaagacagtgaatggaacgatattttaagagcgaagggtgtaataccagaacgtgcaccttcgcccactgcaaagttagaagaagcattagaagaagcaattgccaagcagcatgaaaatagactagaagataaagacttgtcggatttggaagaactagaagacgatgaagatgaagatttcttggaagcttacaagatcaaaagattaaatgaaatccgcaaattacaggaacgttccaaatttggagaagttttccacattaacaaacctgaatacaacaaagaggttactttggccagtcagggaaagaaatatgaaggtgcacaaaccaatgacaatggtgaagaggatgacggtggtgtctacgtattcgttcatctctcgcttcaaagtaaactacaaagcagaattctgtctcatcttttccaatctgctgcatgcaaattcagagaaataaaatttgtagaaatacctgccaatagagcaattgaaaactatcccgaatccaattgcccgacattaattgtatattaccggggtgaggtaatcaaaaacatgataacgctactagaactgggtggtaataattccaagatggaagactttgaagattttatggtaaaagttggcgctgttgcagaaggagacaacagactgataatgaaccgagacgatgaagaatccagggaagagagaaaattgcattacggtgaaaaaaaatcgatcaggtcaggtattagaggaaaatttaatgtcggcataggtggaaatgatgatggcaacattaatgatgatgatgatggattttttgactaa

SEQ ID NO: 10664 - DNA, 861 bp, Artificial Sequence
  Description of Artificial Sequence: Synthetic polynucleotide
atgcagaatgaaccaatgtttcaggtccaggtggacgaatctgaagacagtgaatggaacgatattttaagagcgaagggtgtaataccagaacgtgcaccttctcccactgcaaagttagaagaagcattagaagaagcaattgccaagcagcatgaaaatagattagaagataaagacttgagtgatttggaagaattggaagacgatgaagatgaagatttcttggaagcttacaagatcaaaagattaaatgaaatccgcaaattacaggaacgttccaaatttggagaagttttccacattaacaaacctgaatacaacaaagaggttactttggccagtcagggaaagaaatatgaaggtgcacaaaccaatgacaatggtgaagaggatgacggtggtgtctacgtattcgttcatctctcccttcaaagtaaattacaaagcagaattttatctcatcttttccaatctgctgcatgcaaattcagagaaataaaatttgtagaaatacctgccaatagagcaattgaaaactatcccgaatccaattgcccgacattaattgtatattacagaggtgaggtaatcaaaaacatgataacgttattggaattgggtggtaataattccaagatggaagactttgaagattttatggtaaaagttggcgctgttgcagaaggagacaacagattaataatgaacagagacgatgaagaatccagggaagagagaaaattgcattacggtgaaaaaaaatctatcaggtctggtattagaggaaaatttaatgtcggcataggtggaaatgatgatggcaacattaatgatgatgatgatggattttttgactga

SEQ ID NO: 10665 - DNA, 693 bp, Saccharomyces cerevisiae
atgactaaggaagtaccatattattgcgataatgacgataacaacatcatcagattattcattattaggcatggacaaacagaacacaatgtaaaaaaaattttgcaaggtcacaaagatacctcgatcaatcctacgggagaagaacaagccactaaattggggcattacttgcgttcaagaggtattcattttgataaggttgtcagtagtgatttaaaaaggtgtaggcaaactacggctttagttttgaaacattcaaaacaagaaaatgtgcctacttcctatacttcggggttaagggagcgttatatgggtgttattgaaggtatgcagattactgaggctgaaaagtatgctgataaacatggtgaaggctcctttagaaattttggggaaaaaagtgacgattttgttgctaggttaactggatgtgtcgaagaagaagttgctgaagcatctaatgaaggtgtcaagaatctagccctagttagtcatggaggtgctatcagaatgattttacaatggttaaagtatgaaaatcatcaagctcataagatcattgttttcaacacctctgtcactatagttgattacgtcaaggactccaagcagtttattgtgagacgtgtcggaaacacccaacatcttggtgatggcgaatttgtcgtcagtgacttaagattacgttag

SEQ ID NO: 10666 - DNA, 693 bp, Artificial Sequence
  Description of Artificial Sequence: Synthetic polynucleotide
atgactaaggaagtaccatattattgcgataatgacgataacaacatcatcagattattcattattaggcatggacaaacagaacacaatgtaaaaaaaattttgcaaggtcacaaagatacctctatcaatcctacgggagaagaacaagccactaaattggggcattacttgcgttccagaggtattcattttgataaggttgtcagtagtgatttaaaaaggtgtaggcaaactacggctttagttttgaaacattctaaacaagaaaatgtgcctacttcctatacttctgggttaagggagcgttatatgggtgttattgaaggtatgcagattactgaggctgaaaagtatgctgataaacatggtgaaggctcctttagaaattttggggaaaaaagtgacgattttgttgctaggttaactggatgtgtcgaagaagaagttgctgaagcatctaatgaaggtgtcaagaatttggccttagttagtcatggaggtgctatcagaatgattttacaatggttaaagtatgaaaatcatcaagctcataagatcattgttttcaacacctctgtcactatagttgattacgtcaaggactccaagcagtttattgtgagacgtgtcggaaacacccaacatcttggtgatggcgaatttgtcgtcagtgacttaagattacgttga

SEQ ID NO: 10667 - DNA, 732 bp, Saccharomyces cerevisiae
atgcaacaaacaaaatttggcaagatgtatttggaccacgattcggtagttgagtactcagaagatgaaattgtcgaagccgatcgtattacattgggctataaaaagagattgtcaatgattgaaaatcaaatgcgacatcttttggaggattttagtttggacgttcagcagattgaacccattcttgccgacttgcagaagtactacgacgcgtttctacaacttttacagaaaaggaacaaatcattacaatgtaagaggtccactcaccagccggtcccatccccaatgaatagccagacatcaacaaatgcaaaggttaatttgagcggaaagcttatgaagtttcagctaaatagtgtacaaaagttcgacgaagaaaatatactaaggattctgcaaaataaaatagaattcgaacattatttccaaattgataaaggtaagaagcaaaaggtgctattacttgccgtatatcaatgcctcaatgggccaacacgtttgcataaagtgcttaatattgagggaattatacataataatagtatcagaactatactgggcaaacaagtgtccagttctaagtggacagtgtttctgtacgatgtaaaactagttttattggcgcatagacaagatgttccgaacttagaaactagcaagatgatcgtcagatatggtgatttatttccctgtgcattgtacttcaaagatcatacagcatactaa

SEQ ID NO: 10668 - DNA, 732 bp, Artificial Sequence
  Description of Artificial Sequence: Synthetic polynucleotide
atgcaacaaacaaaatttggcaagatgtatttggaccacgattctgtagttgagtactctgaagatgaaattgtcgaagccgatcgtattacattgggctataaaaagagattgtccatgattgaaaatcaaatgagacatcttttggaggattttagtttggacgttcagcagattgaacccattcttgccgacttgcagaagtactacgacgcgtttttgcaacttttacagaaaaggaacaaatctttacaatgtaagaggtccactcaccagccggtcccatccccaatgaatagccagacatctacaaatgcaaaggttaatttgagcggaaagcttatgaagtttcagttgaatagtgtacaaaagttcgacgaagaaaatatattaaggattttacaaaataaaatagaattcgaacattatttccaaattgataaaggtaagaagcaaaaggtgttattacttgccgtatatcaatgcctcaatgggccaacacgtttgcataaagtgcttaatattgagggaattatacataataatagtatcagaactatattgggcaaacaagtgtccagttctaagtggacagtgtttttgtacgatgtaaaattggttttattggcgcatagacaagatgttccgaacttagaaactagcaagatgatcgtcagatatggtgatttatttccctgtgcattgtacttcaaagatcatacagcatactga

SEQ ID NO: 10669 - DNA, 420 bp, Saccharomyces cerevisiae
atgtggaaggccgtgatgaatgcttggaatggaaccgagagtcaaagtaagaatgtttcaaatattcaatcttacagttttgaagacatgaaaagaatcgttggaaagcatgatcctaatgtggttttggtagatgttagagaaccatctgagtactcgattgttcatattcctgcttccatcaatgtgccatatagatcgcaccctgacgcatttgccttagatcctttagaatttgagaaacagattggcatcccaaaacctgacagtgccaaggagctaatattttattgtgcttctggcaaacgcgggggagaagctcaaaaagtcgcctcctcacatggatattcaaacacctcactatatcctggctctatgaatgattgggtttctcatgggggtgataaacttgacttatag

SEQ ID NO: 10670 - DNA, 420 bp, Artificial Sequence
  Description of Artificial Sequence: Synthetic polynucleotide
atgtggaaggccgtgatgaatgcttggaatggaaccgagagtcaaagtaagaatgtttctaatattcaatcttacagttttgaagacatgaaaagaatcgttggaaagcatgatcctaatgtggttttggtagatgttagagaaccatctgagtactctattgttcatattcctgcttccatcaatgtgccatatagaagtcaccctgacgcatttgccttagatcctttagaatttgagaaacagattggcatcccaaaacctgacagtgccaaggagttgatattttattgtgcttctggcaaacgcgggggagaagctcaaaaagtcgcctcctctcatggatattccaacacctctttgtatcctggctctatgaatgattgggtttctcatgggggtgataaacttgacttatga

SEQ ID NO: 10671 - DNA, 450 bp, Saccharomyces cerevisiae
atgttcaagcatagtacaggtattctctcgaggacagtttctgcaagatcgcctacattggtcctgagaacatttacaacgaaggctccaaagatctatacttttgaccaggtcaggaacctagtcgaacaccccaatgataaaaaactattggtagatgtaagggaacccaaggaagtaaaggattacaagatgccaactacaataaatattccggtgaatagtgcccctggcgctcttggattgcccgaaaaggagtttcacaaagttttccaatttgctaaaccacctcacgataaagaattgatttttctttgtgcgaaaggagtaagagccaaaactgccgaagagttggctcgatcttatgggtacgaaaacactggtatctatcctggttctattactgagtggttagctaaaggtggtgctgacgttaagcccaaaaaataa

SEQ ID NO: 10672 - DNA, 450 bp, Artificial Sequence
  Description of Artificial Sequence: Synthetic polynucleotide
atgttcaagcatagtacaggtattctctccaggacagtttctgcaagatctcctacattggtcttgagaacatttacaacgaaggctccaaagatctatacttttgaccaggtcaggaacttggtcgaacaccccaatgataaaaaacttttggtagatgtaagggaacccaaggaagtaaaggattacaagatgccaactacaataaatattccggtgaatagtgcccctggcgctcttggattgcccgaaaaggagtttcacaaagttttccaatttgctaaaccacctcacgataaagaattgatttttctttgtgcgaaaggagtaagagccaaaactgccgaagagttggctcgttcttatgggtacgaaaacactggtatctatcctggttctattactgagtggttagctaaaggtggtgctgacgttaagcccaaaaaatga

SEQ ID NO: 10673 - DNA, 903 bp, Saccharomyces cerevisiae
atgtcgtattactttaaaaatctgaagccagacttgaactccgacgtagaagaagatgacggaaacttattggagagcataatggcgaacaaaagtaagcgagaaattgacgaacaagaatcaagtgacgatgagttgaaaaccttgtcttttggttctttgaagaaggctgaaacggtaatagatgaagaagatttcaaagatacgaaacccgttcacaaaaaaccgatcacaactacatacagagaagaaagttttgatgaagatgaggacagtgaggaccaatcagacgaggatgctggattctttgaagaagatagtgaggatgaaactcatcatggtcagaaagtaccaaaaaagaagagcaaacacgctccagtagaacaatcatccaagaaaagggtaccacgagtccgaaatatccctgggctggaaataccgaggaataaaaggtctaacctctatcaggacatcagatttgataagtccaccggtaaagcccttgatagttctatcataagaaaacgttaccagttcttggacgaatatagagaaaaagaaattgatgaactgcagaagctgttacaagaaagaaaatttctatcaaaaatagaccagggagaacgtgaagaaatggaacaaagactgaaaagtatgaaatcgagattgcaatcaatgaaaaacaaagatctcgagcgtgaaattctcaaggaatacgaaaatgatatgaataaaaacaataatacgagataccatttgaaaaagtctgagaaacgtaaagtggtgcaaaagtggaaatttgatcacatgaaggccaagcaacgtgaaaaggtcatggaaaggaaaaggaagaagagattgggtaaagagtttaaacaatttgaatttcataatcgtaggtag

SEQ ID NO: 10674 - DNA, 903 bp, Artificial Sequence
  Description of Artificial Sequence: Synthetic polynucleotide
atgtcttattactttaaaaatttgaagccagacttgaactccgacgtagaagaagatgacggaaacttattggagagcataatggcgaacaaaagtaagagagaaattgacgaacaagaaagtagtgacgatgagttgaaaaccttgtcttttggttctttgaagaaggctgaaacggtaatagatgaagaagatttcaaagatacgaaacccgttcacaaaaaaccgatcacaactacatacagagaagaaagttttgatgaagatgaggacagtgaggaccaatctgacgaggatgctggattctttgaagaagatagtgaggatgaaactcatcatggtcagaaagtaccaaaaaagaagagcaaacacgctccagtagaacaatcttccaagaaaagggtaccaagagtcagaaatatccctgggttggaaataccgaggaataaaaggtctaacctctatcaggacatcagatttgataagtccaccggtaaagcccttgatagttctatcataagaaaacgttaccagttcttggacgaatatagagaaaaagaaattgatgaattacagaagcttttacaagaaagaaaatttttatccaaaatagaccagggagaacgtgaagaaatggaacaaagattgaaaagtatgaaatctagattgcaatctatgaaaaacaaagatctcgagcgtgaaattctcaaggaatacgaaaatgatatgaataaaaacaataatacgagataccatttgaaaaagtctgagaaacgtaaagtggtgcaaaagtggaaatttgatcacatgaaggccaagcaacgtgaaaaggtcatggaaaggaaaaggaagaagagattgggtaaagagtttaaacaatttgaatttcataatcgtaggtga

SEQ ID NO: 10675 - DNA, 957 bp, Saccharomyces cerevisiae
atgttatttcttaatattattaagctccttttgggactttttattatgaatgaagtaaaggcgcaaaacttttacgattccgatcctcatatatcagagttaacgccaaaaagcttcgataaagcgatccataacacaaattacacatcattagtggaattttatgctccgtggtgcggccattgtaagaagctctctagtacgttccgcaaggcagcaaaaagattggatggtgtagtccaagttgctgctgtaaactgtgaccttaacaagaataaggctttgtgtgctaaatacgacgtaaacggatttcccacgttaatggtatttaggcccccaaaaattgacctatctaagccaatagataacgccaaaaaaagtttcagcgctcatgccaatgaagtgtactcaggtgcaagaactctcgcgcctattgttgatttttctctttcaagaataaggtcatatgtcaaaaagtttgtccgtatagatacacttggctctttacttagaaagtcacccaaactttccgtggtgttgttttccaaacaagacaaaatttcaccggtttataaaagcattgcccttgattggttaggaaagttcgatttttattcaatttcaaacaaaaaactcaagcaactaaccgatatgaacccaacatatgaaaaaactcctgagattttcaaatatttgcagaaggtcattcctgaacagcgacagagcgataaaagtaagcttgtcgtttttgatgcagacaaagataaattttgggagtatgaagggaactcaatcaacaaaaatgacatttccaaatttctgcgggacacttttagtattacccccaatgagggtccttttagtagacgttctgaatatattgcttacttaaaaactggcaagaagccaattaaaaagaaccattcctcctcaggaaacaagcacgacgaattgtag

SEQ ID NO: 10676 - DNA, 957 bp, Artificial Sequence
  Description of Artificial Sequence: Synthetic polynucleotide
atgttatttcttaatattattaagctccttttgggactttttattatgaatgaagtaaaggcgcaaaacttttacgattccgatcctcatatatctgagttaacgccaaaaagcttcgataaagcgatccataacacaaattacacaagtttagtggaattttatgctccgtggtgcggccattgtaagaagctctctagtacgttccgcaaggcagcaaaaagattggatggtgtagtccaagttgctgctgtaaactgtgaccttaacaagaataaggctttgtgtgctaaatacgacgtaaacggatttcccacgttaatggtatttaggcccccaaaaattgacttgtctaagccaatagataacgccaaaaaaagtttcagcgctcatgccaatgaagtgtactctggtgcaagaactctcgcgcctattgttgatttttctctttctagaataaggagttatgtcaaaaagtttgtccgtatagatacacttggctctttacttagaaagtctcccaaactttccgtggtgttgttttccaaacaagacaaaatttctccggtttataaaagcattgcccttgattggttaggaaagttcgatttttattctatttccaacaaaaaactcaagcaattgaccgatatgaacccaacatatgaaaaaactcctgagattttcaaatatttgcagaaggtcattcctgaacagagacagagcgataaaagtaagcttgtcgtttttgatgcagacaaagataaattttgggagtatgaagggaactctatcaacaaaaatgacatttccaaatttttaagagacacttttagtattacccccaatgagggtccttttagtagacgttctgaatatattgcttacttaaaaactggcaagaagccaattaaaaagaaccattcctccagtggaaacaagcacgacgaattgtga

SEQ ID NO: 10677 - DNA, 756 bp, Saccharomyces cerevisiae
atggctttaaggctatttcgaaaatccagtttttttgcaaagatatcaatggaaggccctaaaggttcatcgccatttgcgttttacgcattttatcaactttattcgcacttgaatccggggaaatcgagcagcctttctttagaagatattagaagaaggctataccccgactttaaaatagattacaatgagaaaacttcgttgttcataacttggaagaaaaagtccaataaacatcacacaatagacactaacgaagagaattatatacttagaggatgtatcggtacatttgctaagatgccgattgcacatggtattgagaaatattccttgattgctgctttagaggataggagattttctccgatccagaaaagggaattggtggacctgaaatgcagttgcaacatcttaggcaacttcaaaactatttttcgaggtggtggtaatccaaatggggacattttcgattgggaactcggaaagcacggtattgaactgtattttaagcatcccaaaacaggcaccacatgtagcgcaacctttttacctgatgttatgcctgagcaacattggaataaagaagatacctttgccaatttaatcgagaaggcgggttactggggcaatattagtgaagtaatggataattttgaaacttatttcattgaagtaataaggtacgagggcaaaaaaagttccataacttatgaggaatttaacaaacagttaaaagatatagaggcttag

SEQ ID NO: 10678 - DNA, 756 bp, Artificial Sequence
  Description of Artificial Sequence: Synthetic polynucleotide
atggctttaaggttatttagaaaatccagtttttttgcaaagatatccatggaaggccctaaaggttcttctccatttgcgttttacgcattttatcaactttattctcacttgaatccggggaaaagtagcagcctttctttagaagatattagaagaaggttgtaccccgactttaaaatagattacaatgagaaaacttctttgttcataacttggaagaaaaagtccaataaacatcacacaatagacactaacgaagagaattatatacttagaggatgtatcggtacatttgctaagatgccgattgcacatggtattgagaaatattccttgattgctgctttagaggataggagattttctccgatccagaaaagggaattggtggacttgaaatgcagttgcaacatcttaggcaacttcaaaactatttttagaggtggtggtaatccaaatggggacattttcgattgggaactcggaaagcacggtattgaattgtattttaagcatcccaaaacaggcaccacatgtagcgcaacctttttacctgatgttatgcctgagcaacattggaataaagaagatacctttgccaatttaatcgagaaggcgggttactggggcaatattagtgaagtaatggataattttgaaacttatttcattgaagtaataaggtacgagggcaaaaaaagttccataacttatgaggaatttaacaaacagttaaaagatatagaggcttga

SEQ ID NO: 10679 - DNA, 5112 bp, Saccharomyces cerevisiae
atgaacataccacagcgtcaatttagcaacgaagaggtcaaccgctgctatttaagatggcagcatttgagaaatgaacacggaatgaacgctccgagtgtgccggaatttatctatttgactaaagtgttgcaatttgctgccaagcagcgacaagaattacaaatgcaacgccaacagcaaggcatttcaggttctcagcaaaatattgttccaaattcttcagatcaagcagaactgccgaataatgcttcctcgcacatttctgcttctgcttccccgcatttagctccgaatatgcaattgaatggaaatgagacctttagcacttctgctcatcaatcaccaatcatgcaaacacagatgccattaaatagcaatggtggtaataacatgctaccacaacggcaatcttcggttggttcattaaatgcaactaatttttcaccaacaccagcaaacaatggagaaaatgctgcggagaaaccagataactcaaaccataataacttaaaccttaataattccgagcttcaaccgcaaaatcgatcattacaagaacacaacatacaggattcaaatgtgatgccaggttcgcagataaattctcctatgccccagcaggcgcagatgcagcaggcacaattccaagcacaacaggcgcaacaagcgcaacaggcacaacaggcacaacaagcacaagcgagactgcaacaggggagaagattacccatgacaatgtttactgccgagcaatccgaactgttaaaggcccaaatcacatctctaaaatgtctagtaaatagaaagcctattccgtttgaatttcaggctgttatccaaaaatctattaaccatcctccagatttcaaaagaatgttactgtctttgagtgagtttgcgagaagaagacaacccacagatcaaaataaccaatcaaatctcaatggcggcaacaatacgcagcaacccggcaccaattcccactacaataacactaacactgacaacgtttctgggcttaccagaaatgcacctttagatagcaaagacgaaaattttgcatctgtttcaccagctggtccatctagtgtacataatgcgaagaatggcaccctcgataaaaattcgcaaactgtaagtggcactccaatcacgcaaacagaatcgaaaaaagaggaaaacgaaaccatttcaaacgtagctaaaacagctcctaatagtaataagacccacaccgagcaaaataacccgccaaaaccgcagaaacccgttcctttaaacgtccttcaagatcaatataaggaaggaataaaagtggtagatatagatgatcctgatatgatggttgattcttttacgatgcccaatatctcacatagtaatatcgattatcagactttattggccaattcggatcatgcaaagtttactattgaacctggcgttctaccggttggtattgacacacataccgctactgacatttaccaaactttaattgcattgaacctagatactacggtaaatgactgtttggataagctactaaatgacgaatgtacggaatcaaccagggaaaatgctctttacgattactacgccttacaattattaccgttacaaaaagccgtaagaggtcatgtattacaatttgaatggcatcaaaattctttattaaccaatacacatccaaattttctttcgaaaataagaaacatcaacgttcaagatgcattgctaacaaaccaactttataagaatcatgaattacttaagttagaaaggaagaagactgaggcagtggccagattaaagtcgatgaataaatccgccatcaatcaatataatagaagacaagataaaaagaataaaaggttgaagtttggccatagactcattgctacgcatactaatttagaaagggatgagcaaaagagagctgaaaaaaaggcaaaagaacgtttacaggctttaaaggcgaacgatgaggaagcctatataaaattattagaccaaaccaaagatacaagaattacacatcttctaaggcaaacaaacgcatttttagattctttaacaagagccgtgaaagatcaacaaaagtacactaaagaaatgattgattcccacataaaggaagcatcggaggaagtggatgatttgtccatggtccccaagatgaaggatgaagaatatgatgacgacgacgacaattctaacgtcgattattacaatgtcgcacatagaattaaagaagatatcaagaagcagccttcaatattggttggtggtaccttaaaggactatcaaatcaagggtttacagtggatggtttcgcttttcaataatcatttaaatggtattttagcagacgaaatgggtcttggtaagactatccagacgatatccttacttacatatttatatgaaatgaagaatattcgtgggccatatttagtcattgttcctttatctacactgtcaaattggagcagtgaattcgcgaaatgggctcctaccttaagaactatatcatttaaaggttcgccaaatgagaggaaagccaaacaggctaaaataagggcaggtgaatttgatgtagttctgactacctttgagtatattattaaagaaagagcacttttatccaaggtcaagtgggtccatatgattattgatgaaggccatagaatgaaaaatgcgcaatccaagctttctttaaccttgaacacacattaccatgcagattatagattaattttgacaggtacaccacttcaaaacaacttgccagaattatgggccttattgaattttgtgttacccaagattttcaattccgtgaaatcttttgatgaatggttcaatacaccctttgccaacaccggtgggcaagataaaattgagttgagtgaagaagagacgcttttggttatcaggagattgcataaagtcttgagaccctttttattgcgtcgtttgaaaaaggatgtagaaaaagaattaccggataaagttgagaaggtagtgaagtgcaaaatgagcgctttacaacaaattatgtaccaacaaatgttgaaatatcgtcgtctttttatcggtgatcaaaataataagaaaatggtaggtttaagaggtttcaataatcaaatcatgcaactaaagaaaatctgtaatcatccttttgtatttgaagaagttgaggaccaaatcaatccaacaagagaaacgaatgatgatatttggcgtgttgctggtaaatttgaactattagatagaattttgcctaagcttaaggcaactgggcatagagtattaattttttttcaaatgacccaaattatggatattatggaagattttttaaggtacattaatatcaagtacctgaggttagatggtcatacaaaatctgatgaacgtagtgagttgttacgtctatttaacgcccctgattctgaatacttgtgctttatcttatcaactagagcgggtggtttgggtttaaatttacaaactgcagacactgtcattatttttgatactgactggaatcctcatcaagatttgcaagctcaggatagagcgcatagaataggtcagaagaatgaagttagaattctaagattgattactacgaattcagttgaagaagttatcctagagagagcctacaagaagctagatatcgatggtaaagtcattcaagcaggtaaattcgataacaaatctacatcggaggaacaagaagcgttgcttagatctttgctggatgcagaagaggaacgtagaaagaaaagagagtctggtgttgaagaagaagaggagttaaaagactcagaaatcaacgaaattcttgctcgaaatgacgaagaaatggctgttcttacaaggatggatgaagatagatcaaagaaggaggaagaattgggagtaaagagccgtctcttagaaaagagtgaattacctgatatttacagtagagatattggtgccgagctcaaacgtgaagaatcagaatctgctgctgtttacaatggaaggggtgcaagagaacgtaagacggcaacttacaacgataatatgtctgaagaacagtggttaagacaatttgaagttagcgatgatgaaaaaaatgacaagcaggcaagaaaacaacgaacaaagaaggaagataagagcgaggcgattgatgggaatggagaaattaaaggcgaaaacattgacgctgataatgacggtcctagaattaataatatatcggccgaagatcgggcagatacggatttggcaatgaatgacgatgatttcttgtctaaaaagagaaaggcaggaaggccccgtggaagacctaagaaagtgaaacttgaaggatctgaaaattctgaaccaccagcgcttgaatcaagtccagttactggcgataactctcccagtgaggattttatggacattccaaaaccacgtacagcgggaaaaacatctgttaaatcagcaagaacttcaacaaggggccgtggtcgcggtcgtggtcgtggtcgagggcgaggacgtggacgaggaaggccgccaaaagcaagaaatgggcttgattatgtccgcacgcccgctgcggcaacgagtcctattgatattagagagaaagttgctaaacaagctctagacttataccactttgctctcaattatgaaaatgaagctggaaggaaactttctgacattttcctctccaaaccttccaaagcactatatcccgactactatatgattattaagtaccctgtcgcctttgataatattaacacgcatattgaaacgctagcttacaactcccttaaagagacccttcaagactttcatctgatattttccaatgctaggatatacaatactgagggttcagtagtatacgaagactctttagaactggaaaaagtggttacgaagaaatactgtgagataatgggcgataactcacaactcgactttactgaatttgatgaacagtatggcaccagacccctcgtcttgcctcctgttgttacttcaagcgtggctgaatctttcacagatgaagcggactcgagcatgacagaagcgagtgtatag

SEQ ID NO: 10680 - DNA, 5112 bp, Artificial Sequence
  Description of Artificial Sequence: Synthetic polynucleotide
atgaacataccacagcgtcaatttagcaacgaagaggtcaaccgctgctatttaagatggcagcatttgagaaatgaacacggaatgaacgctccgagtgtgccggaatttatctatttgactaaagtgttgcaatttgctgccaagcagagacaagaattacaaatgcaacgccaacagcaaggcatttctggttctcagcaaaatattgttccaaattcttctgatcaagcagaattaccgaataatgcttcctcccacatttctgcttctgcttccccgcatttagctccgaatatgcaattgaatggaaatgagacctttagcacttctgctcatcaatctccaatcatgcaaacacagatgccattaaatagcaatggtggtaataacatgcttccacaaagacaatcttctgttggttctttaaatgcaactaatttttctccaacaccagcaaacaatggagaaaatgctgcggagaaaccagataactccaaccataataacttaaaccttaataattccgagcttcaaccgcaaaatagatctttacaagaacacaacatacaggattctaatgtgatgccaggttctcagataaattctcctatgccccagcaggcgcagatgcagcaggcacaattccaagcacaacaggcgcaacaagcgcaacaggcacaacaggcacaacaagcacaagcgagattacaacaggggagaagattacccatgacaatgtttactgccgagcaatccgaattattaaaggcccaaatcacatctttgaaatgtttggtaaatagaaagcctattccgtttgaatttcaggctgttatccaaaaatctattaaccatcctccagatttcaaaagaatgttattatctttgagtgagtttgcgagaagaagacaacccacagatcaaaataaccaaagcaatctcaatggcggcaacaatacgcagcaacccggcaccaattcccactacaataacactaacactgacaacgtttctgggcttaccagaaatgcacctttagatagcaaagacgaaaattttgcatctgtttctccagctggtccatctagtgtacataatgcgaagaatggcaccctcgataaaaattctcaaactgtaagtggcactccaatcacgcaaacagaaagtaaaaaagaggaaaacgaaaccatttccaacgtagctaaaacagctcctaatagtaataagacccacaccgagcaaaataacccgccaaaaccgcagaaacccgttcctttaaacgtccttcaagatcaatataaggaaggaataaaagtggtagatatagatgatcctgatatgatggttgattcttttacgatgcccaatatctctcatagtaatatcgattatcagactttattggccaattctgatcatgcaaagtttactattgaacctggcgttttaccggttggtattgacacacataccgctactgacatttaccaaactttaattgcattgaaccttgatactacggtaaatgactgtttggataagttattgaatgacgaatgtacggaaagtaccagggaaaatgctctttacgattactacgccttacaattattaccgttacaaaaagccgtaagaggtcatgtattacaatttgaatggcatcaaaattctttattaaccaatacacatccaaattttctttctaaaataagaaacatcaacgttcaagatgcattgttgacaaaccaactttataagaatcatgaattacttaagttagaaaggaagaagactgaggcagtggccagattaaagtctatgaataaatccgccatcaatcaatataatagaagacaagataaaaagaataaaaggttgaagtttggccatagactcattgctacgcatactaatttagaaagggatgagcaaaagagagctgaaaaaaaggcaaaagaacgtttacaggctttaaaggcgaacgatgaggaagcctatataaaattattagaccaaaccaaagatacaagaattacacatcttttgaggcaaacaaacgcatttttagattctttaacaagagccgtgaaagatcaacaaaagtacactaaagaaatgattgattcccacataaaggaagcaagtgaggaagtggatgatttgtccatggtccccaagatgaaggatgaagaatatgatgacgacgacgacaattctaacgtcgattattacaatgtcgcacatagaattaaagaagatatcaagaagcagccttccatattggttggtggtaccttaaaggactatcaaatcaagggtttacagtggatggtttcccttttcaataatcatttaaatggtattttagcagacgaaatgggtcttggtaagactatccagacgatatccttacttacatatttatatgaaatgaagaatattcgtgggccatatttagtcattgttcctttatctacattatccaattggagcagtgaattcgcgaaatgggctcctaccttaagaactatatcctttaaaggttctccaaatgagaggaaagccaaacaggctaaaataagggcaggtgaatttgatgtagttttaactacctttgagtatattattaaagaaagagcacttttatccaaggtcaagtgggtccatatgattattgatgaaggccatagaatgaaaaatgcgcaatccaagctttctttaaccttgaacacacattaccatgcagattatagattaattttgacaggtacaccacttcaaaacaacttgccagaattatgggccttattgaattttgtgttacccaagattttcaattccgtgaaatcttttgatgaatggttcaatacaccctttgccaacaccggtgggcaagataaaattgagttgagtgaagaagagacgcttttggttatcaggagattgcataaagtcttgagaccctttttattgcgtcgtttgaaaaaggatgtagaaaaagaattaccggataaagttgagaaggtagtgaagtgcaaaatgagcgctttacaacaaattatgtaccaacaaatgttgaaatatcgtcgtctttttatcggtgatcaaaataataagaaaatggtaggtttaagaggtttcaataatcaaatcatgcaattgaagaaaatctgtaatcatccttttgtatttgaagaagttgaggaccaaatcaatccaacaagagaaacgaatgatgatatttggcgtgttgctggtaaatttgaattattagatagaattttgcctaagcttaaggcaactgggcatagagtattaattttttttcaaatgacccaaattatggatattatggaagattttttaaggtacattaatatcaagtacttgaggttagatggtcatacaaaatctgatgaacgtagtgagttgttacgtttgtttaacgcccctgattctgaatacttgtgctttatcttatctactagagcgggtggtttgggtttaaatttacaaactgcagacactgtcattatttttgatactgactggaatcctcatcaagatttgcaagctcaggatagagcgcatagaataggtcagaagaatgaagttagaattttaagattgattactacgaattctgttgaagaagttatcttggagagagcctacaagaagttggatatcgatggtaaagtcattcaagcaggtaaattcgataacaaatctacaagtgaggaacaagaagcgttgcttagatctttgttggatgcagaagaggaacgtagaaagaaaagagagtctggtgttgaagaagaagaggagttaaaagactctgaaatcaacgaaattcttgctagaaatgacgaagaaatggctgttcttacaaggatggatgaagatagatccaagaaggaggaagaattgggagtaaagagccgtctcttagaaaagagtgaattacctgatatttacagtagagatattggtgccgagctcaaacgtgaagaaagtgaatctgctgctgtttacaatggaaggggtgcaagagaacgtaagacggcaacttacaacgataatatgtctgaagaacagtggttaagacaatttgaagttagcgatgatgaaaaaaatgacaagcaggcaagaaaacaaagaacaaagaaggaagataagagcgaggcgattgatgggaatggagaaattaaaggcgaaaacattgacgctgataatgacggtcctagaattaataatatatctgccgaagatagagcagatacggatttggcaatgaatgacgatgatttcttgtctaaaaagagaaaggcaggaaggccccgtggaagacctaagaaagtgaaacttgaaggatctgaaaattctgaaccaccagcgcttgaaagtagtccagttactggcgataactctcccagtgaggattttatggacattccaaaaccacgtacagcgggaaaaacatctgttaaatctgcaagaacttctacaaggggccgtggtcgcggtcgtggtcgtggtcgtgggagaggacgtggaagaggaaggccgccaaaagcaagaaatgggcttgattatgtccgcacgcccgctgcggcaacgagtcctattgatattagagagaaagttgctaaacaagctttggacttataccactttgctctcaattatgaaaatgaagctggaaggaaactttctgacattttcctctccaaaccttccaaagcattatatcccgactactatatgattattaagtaccctgtcgcctttgataatattaacacgcatattgaaacgttggcttacaactcccttaaagagacccttcaagactttcatttgatattttccaatgctaggatatacaatactgagggttctgtagtatacgaagactctttagaattggaaaaagtggttacgaagaaatactgtgagataatgggcgataactctcaactcgactttactgaatttgatgaacagtatggcaccagacccctcgtcttgcctcctgttgttacttccagcgtggctgaatctttcacagatgaagcggactccagcatgacagaagcgagtgtatga

SEQ ID NO: 10681 - DNA, 4419 bp, Saccharomyces cerevisiae
atggatattccctcttcaaaccaaattcaacatggccaaaggagtgaaaggaaccgaagaatgccgagggcttctttttcttctacagccactacttctacggcggccacattgacttccgcgatggtactggatcagaacaattcggaaccgtacgcaggtgcaacattcgaagccgtgccaagttctattgtatcattccatcaccctcattcttttcaatcaagcaacctcccaagtccgcattcttcagggaacctagagcagagaggccgccgattgactgaatcagagcctttagtattatcctcggctgaacagtctcgaagctcttctagaaacccttctcattttcgatttttcactcaggagcaaatatccaatgctgaaggcgcttccacgttagaaaatacagattatgacatggcctgggatgccacccccgcttatgaacaagatagaatctatggtacgggcctatcttccaggcgttcttctattcgaagtttttccagagcatcatctctctcaaatgcaaagtcttatggatctttcagtaagaggggtcgctctggttcaagggcaccacaaaggctgggagaaaattctgacactgggttcgtttatcattccgctacacattcatcatccagtttatcgagatatacgaccagagaaagaattcctattgaactagaaagtcaaacagatgaaatactagaagacgagtcttctacacattctttagaatcttcagatagtaggcgatctgcaagcgaaaataatagaggaagcttttctggtcatgatgatgttcataatcagcatagcgaatatctaaaacctgactatcatgaaaagttttatccacagtatgcaccaaacttgcattaccaaaggttttacattgcggaagaggatttagttattggtatcgctgcttaccagacctcaaaattctggtatattatttacaacctgtgctgcttcttgactttcggattagtttatcttttaacgagatggcttccccatctcaaagttaaattatatggcgtgaaagtgccattggctaaagcagaatgggtcgtgatagaaaatgagtttggtgagtttgtcatacaacctatcgatcgacagtggtataatagaccattaagtactgttttaccttttgaaaattaccctaatccgtcatatgaaccaaatgatatcaatttgagccaccaccatgccaatgaaattaatccaaatgtgcctatcttgatcacatttgaatacagatatattaagttcatatattcaccgctcgatgatctctttaaaactaacaataactggatagatcctgactgggtggatttaagtaccgtatcaaatggtttaactaagggggttcaagaagatagagaacttgcgtttggtaaaaatcaaattaatttgagaatgaaaactacttcagaaattttattcaatgaagtgttgcatccgttttatgtctttcaagtattttcgataattttgtggggcattgatgaatactactactacgccgcatgcatttttttgatttctgtactgtctatttttgattcattgaatgaacagaagaaagtatcgagaaacttagctgaaatgtcgcactttcattgtgacgttcgtgttttgagggataagttttggacaacgataagctcatcagaactagttccgggcgatatatatgaagtatctgacccaaatataacaatattgccttgtgactctattcttctgtccagtgattgtatagtcaatgaatccatgctaactggtgaatctgtgcccgtttcgaaatttccagctacggaagaaacaatgtaccaattatgtgacgacttccagagcacccaaatatcgagttttgtttccaaatccttcttgtataatggtacaaatataattagagcaagaattgcccccgggcaaaccgccgctttggcgatggttgtaaggacaggattctcaacaacaaagggctccttggttcgttccatggttttcccaaaaccaactggttttaaattctatagagattcctttaaatatattggattcatgtcattaatcgcaattttcggtttttgcgtcagttgcgttcagttcattaaacttggtttagacaaaaagacaatgatattaagagctttagatatcataacaattgtagtgccaccagctctgcccgcgactttaaccattggtaccaattttgctttgagtaggttaaaggagaagggaatattttgtatctctccaacaaggcttaacattagtggtaaaatcgatgttatgtgttttgataaaactggaacacttaccgaagatggcttagatgtacttggagtacaaatatcggagccaaatggggttagaggccagaagtttggagaactattgagtgatattcgccaagtatttcctaaattttctttgaacgattgtagttcgccattagattttaagtccaggaactttttcatgtcattattaacatgtcactcgctgagatcagttgatggaaatttactcggtgacccactagactttaaaatgtttcaatttaccggttggtcattcgaggaggacttccaaaaacgagcattccattcattatacgagggaagacatgaagatgatgttttcccagaaaattcagaaatcattcctgcggtagttcaccctgatagtaataatagagaaaatacgtttactgataatgatcctcataattttctaggggtggtgagaagctttgaatttttatctgagctgagacgtatgagcgtaattgttaaaacgaataatgacgacgtatattggtcgtttactaaaggtgcgcccgaagttatttcagaaatatgtaataaatcaactttacctgcagattttgaagaagtactacgttgttacactcataacggatatagggttattgcatgtgctgggaagacacttccaaaaagaacttggttatattcccaaaaagtatctagggaagaggttgagtcaaatttggaatttttaggtttcattatcttccaaaataaactaaaaaaagagacctctgaaactctgaaaagtttacaagatgcaaacatcaggacgataatgtgtacgggtgataacatacttactgctatttccgtaggtagggaagctggtttgatacaatgctctcgcgtttatgttccatccattaatgatacacccttgcacggtgagcccgtaatagtatggagggacgtcaatgagccagataaaattttggataccaagactttgaaacctgtcaagctggggaataatagtgttgaaagtctacgtgagtgtaactatactcttgcagttagcggcgatgtatttagactgttgttcagagatgaaaacgagataccagaggaatacttaaacgagattttattgaattcatcaatctacgcaagaatgtcgcctgatgaaaagcatgaattgatgatacagctgcagaagctagattatacagttgggttctgtggtgatggtgcaaatgattgtggggcactcaaagcggcagacgtaggtatttccctttcggaggctgaagcttcagttgctgctccgttcacttcaaagatatttaatattagctgcgtacttgatgtcattagggaagggcgtgctgcgttagttacatcttttgcatgtttccagtacatgagtttgtactctgccatccaattcatcactattactatactttacagccgtggttctaatttgggagatttccaattcctgtacattgatttattgctgatcgttccgatcgcaatttgcatgtcatggtccaaatcctatgaaaagatagataaaaagaggccttccgctaacctagtttcacctaagattttggttcctcttttgattagcgtattcttggtgtttttattccagttcattccatggataatcgtacaaaagatgagctggtacatcaagccaatcgttgggggcgacgacgccgtgcaatcttcagataataccgtattgttcttcgtctcaaattttcaatatattttgactgctatagttttgtctgtgggtccaccatatagagagccgatgtcaaaaaactttgaatttatcgttgatatcactgtctctatcggtgcaagtctactgctaatgactttggatacagaatcataccttggtaagatgttacagctgacccctatatcaaacagttttacaatgtttatcattgtatgggtgatattaaattactatgctcaactgtatataccgccatcgataaaaggttggttaaagaaaaagaagagtagcaaaaagtataaactactgatacaagaagaaatgaaattaaaagaagtttaa

SEQ ID NO: 10682 - DNA, 4419 bp, Artificial Sequence
  Description of Artificial Sequence: Synthetic polynucleotide
atggatattccctcttccaaccaaattcaacatggccaaaggagtgaaaggaacagaagaatgccgagggcttctttttcttctacagccactacttctacggcggccacattgacttccgcgatggtattggatcagaacaattctgaaccgtacgcaggtgcaacattcgaagccgtgccaagttctattgtatctttccatcaccctcattcttttcaaagcagcaacctcccaagtccgcattcttctgggaacttggagcagagaggccgcagattgactgaaagtgagcctttagtattatcctctgctgaacagtctagaagctcttctagaaacccttctcattttagatttttcactcaggagcaaatatccaatgctgaaggcgcttccacgttagaaaatacagattatgacatggcctgggatgccacccccgcttatgaacaagatagaatctatggtacgggcttatcttccaggcgttcttctattagaagtttttccagagcatcttctctctctaatgcaaagtcttatggatctttcagtaagaggggtcgctctggttctagggcaccacaaaggttaggagaaaattctgacactgggttcgtttatcattccgctacacattcttcttccagtttatctagatatacgaccagagaaagaattcctattgaattggaaagtcaaacagatgaaatattggaagacgagtcttctacacattctttagaatcttctgatagtaggcgttctgcaagcgaaaataatagaggaagcttttctggtcatgatgatgttcataatcagcatagcgaatatttgaaacctgactatcatgaaaagttttatccacagtatgcaccaaacttgcattaccaaaggttttacattgcggaagaggatttagttattggtatcgctgcttaccagacctccaaattctggtatattatttacaacttatgctgcttcttgactttcggattagtttatcttttaacgagatggcttccccatctcaaagttaaattatatggcgtgaaagtgccattggctaaagcagaatgggtcgtgatagaaaatgagtttggtgagtttgtcatacaacctatcgatagacagtggtataatagaccattaagtactgttttaccttttgaaaattaccctaatccgagctatgaaccaaatgatatcaatttgagccaccaccatgccaatgaaattaatccaaatgtgcctatcttgatcacatttgaatacagatatattaagttcatatattctccgctcgatgatctctttaaaactaacaataactggatagatcctgactgggtggatttaagtaccgtatctaatggtttaactaagggggttcaagaagatagagaacttgcgtttggtaaaaatcaaattaatttgagaatgaaaactacttctgaaattttattcaatgaagtgttgcatccgttttatgtctttcaagtattttccataattttgtggggcattgatgaatactactactacgccgcatgcatttttttgatttctgtattatctatttttgattctttgaatgaacagaagaaagtatctagaaacttagctgaaatgtctcactttcattgtgacgttcgtgttttgagggataagttttggacaacgataagctcttctgaattggttccgggcgatatatatgaagtatctgacccaaatataacaatattgccttgtgactctattcttctttccagtgattgtatagtcaatgaatccatgttgactggtgaatctgtgcccgtttccaaatttccagctacggaagaaacaatgtaccaattatgtgacgacttccagagcacccaaatatctagttttgtttccaaatccttcttgtataatggtacaaatataattagagcaagaattgcccccgggcaaaccgccgctttggcgatggttgtaaggacaggattcagtacaacaaagggctccttggttcgttccatggttttcccaaaaccaactggttttaaattctatagagattcctttaaatatattggattcatgtctttaatcgcaattttcggtttttgcgtcagttgcgttcagttcattaaacttggtttagacaaaaagacaatgatattaagagctttagatatcataacaattgtagtgccaccagctcttcccgcgactttaaccattggtaccaattttgctttgagtaggttaaaggagaagggaatattttgtatctctccaacaaggcttaacattagtggtaaaatcgatgttatgtgttttgataaaactggaacacttaccgaagatggcttagatgtacttggagtacaaatatctgagccaaatggggttagaggccagaagtttggagaattattgagtgatattcgccaagtatttcctaaattttctttgaacgattgtagttctccattagattttaagtccaggaactttttcatgtctttattaacatgtcactctttgagatctgttgatggaaatttactcggtgacccattggactttaaaatgtttcaatttaccggttggagtttcgaggaggacttccaaaaaagagcattccattctttatacgagggaagacatgaagatgatgttttcccagaaaattctgaaatcattcctgcggtagttcaccctgatagtaataatagagaaaatacgtttactgataatgatcctcataattttttgggggtggtgagaagctttgaatttttatctgagttaagacgtatgagcgtaattgttaaaacgaataatgacgacgtatattggtcttttactaaaggtgcgcccgaagttatttctgaaatatgtaataaatctactttacctgcagattttgaagaagtattacgttgttacactcataacggatatagggttattgcatgtgctgggaagacacttccaaaaagaacttggttatattcccaaaaagtatctagggaagaggttgagagcaatttggaatttttaggtttcattatcttccaaaataaattgaaaaaagagacctctgaaactttgaaaagtttacaagatgcaaacatcaggacgataatgtgtacgggtgataacatacttactgctatttccgtaggtagggaagctggtttgatacaatgctctcgcgtttatgttccatccattaatgatacacccttgcacggtgagcccgtaatagtatggagggacgtcaatgagccagataaaattttggataccaagactttgaaacctgtcaagttagggaataatagtgttgaaagtttacgtgagtgtaactatactcttgcagttagcggcgatgtatttagattattgttcagagatgaaaacgagataccagaggaatacttaaacgagattttattgaattcttctatctacgcaagaatgtctcctgatgaaaagcatgaattgatgatacagttacagaagttggattatacagttgggttctgtggtgatggtgcaaatgattgtggggcactcaaagcggcagacgtaggtatttccctttctgaggctgaagcttctgttgctgctccgttcacttctaagatatttaatattagctgcgtacttgatgtcattagggaagggcgtgctgcgttagttacatcttttgcatgtttccagtacatgagtttgtactctgccatccaattcatcactattactatactttacagccgtggttctaatttgggagatttccaattcttgtacattgatttattgttgatcgttccgatcgcaatttgcatgtcttggtccaaatcctatgaaaagatagataaaaagaggccttccgctaacttggtttctcctaagattttggttcctcttttgattagcgtattcttggtgtttttattccagttcattccatggataatcgtacaaaagatgagctggtacatcaagccaatcgttgggggcgacgacgccgtgcaatcttctgataataccgtattgttcttcgtctccaattttcaatatattttgactgctatagttttgtctgtgggtccaccatatagagagccgatgtccaaaaactttgaatttatcgttgatatcactgtctctatcggtgcaagtttattattgatgactttggatacagaatcttaccttggtaagatgttacagttgacccctataagcaacagttttacaatgtttatcattgtatgggtgatattaaattactatgctcaattatatataccgccaagtataaaaggttggttaaagaaaaagaagagtagcaaaaagtataaattattgatacaagaagaaatgaaattaaaagaagtttga

SEQ ID NO: 10683 - DNA, 930 bp, Saccharomyces cerevisiae
atgcctcttcaactttttggcagggatcagatcgttgtacattatgataacggcaacatgagtaacgatgaccagaatcaccaaagtgttctcggatcttggacaagaagggcagcagcagcattaagaacgttaatgaacaagcgaatacaacgtataacacttacgcactggttgctgttagtcatatgggttactagcctatggaaatttaccagtcattatagacagctgtatgctaattctgctgtttttgcaactttatgcacgaacattcttttatttgggatatctgacatactagcacaaagtatagcctgcttttattcatatcacgtggaccctataccgcaaatacttaacgatacctttcatcatgttcagaacaaccgtgatgtagaaaatggaggaggttatgaaagtgatgagctatctatcttcaatgattttacctcggaacatagctcctacacggataacgacgactatcctgaacttgataggccattagctactttcaaaacggacacatttgacttcttcaggtgggggtgttttatgttctggggattttttatatcatttttccaggctccttggtacaagttcttgaatttcttttacactgaagatccgacagtggtacaggtttttgaaagggttctttcggatcagctcctttattcgccaatctctctctattgtttctttatgttctcaaactatgtgatggaaggtggagataaggacacccttggcaagaaaatccaaaggctatatatatctacgcttggttgtaactatctggtgtggccaatggtacaattcattaatttccttataatgcctagagatttccaagcaccttttagctcttcagttggagtggtatggaattgcttcctttcgatgagaaatgcgtctaaatag

SEQ ID NO: 10684 - DNA, 930 bp, Artificial Sequence
  Description of Artificial Sequence: Synthetic polynucleotide
atgcctcttcaactttttggcagggatcagatcgttgtacattatgataacggcaacatgagtaacgatgaccagaatcaccaaagtgttctcggatcttggacaagaagggcagcagcagcattaagaacgttaatgaacaagagaatacaacgtataacacttacgcactggttgttattagtcatatgggttactagcttgtggaaatttaccagtcattatagacagttatatgctaattctgctgtttttgcaactttatgcacgaacattcttttatttgggatatctgacatattggcacaaagtatagcctgcttttattcttatcacgtggaccctataccgcaaatacttaacgatacctttcatcatgttcagaacaaccgtgatgtagaaaatggaggaggttatgaaagtgatgagctttctatcttcaatgattttaccagtgaacatagctcctacacggataacgacgactatcctgaacttgataggccattagctactttcaaaacggacacatttgacttcttcaggtgggggtgttttatgttctggggattttttatatcctttttccaggctccttggtacaagttcttgaatttcttttacactgaagatccgacagtggtacaggtttttgaaagggttctttctgatcagctcctttattctccaatctctctctattgtttctttatgttcagtaactatgtgatggaaggtggagataaggacacccttggcaagaaaatccaaaggttatatatatctacgcttggttgtaactatttggtgtggccaatggtacaattcattaatttccttataatgcctagagatttccaagcaccttttagctcttctgttggagtggtatggaattgcttcctttctatgagaaatgcgtctaaatga

SEQ ID NO: 10685 - DNA, 318 bp, Saccharomyces cerevisiae
atgttgatgccaaaggaagacagaaacaagatccaccaatacttattccaagaaggtgttgttgtcgccaagaaggatttcaaccaagccaagcacgaagaaattgacaccaagaacttgtatgtcattaaggctttacaatccttgacttctaagggttacgtcaagactcaattctcatggcaatactactactacaccttgactgaagaaggtgttgaatacttgagagaatacttgaacttgccagaacacattgttccaggtacctacattcaagaaagaaacccaactcaaagaccacaaagaagatattaa

SEQ ID NO: 10686 - DNA, 318 bp, Artificial Sequence
  Description of Artificial Sequence: Synthetic polynucleotide
atgttgatgccaaaggaagacagaaacaagatccaccaatacttattccaagaaggtgttgttgtcgccaagaaggatttcaaccaagccaagcacgaagaaattgacaccaagaacttgtatgtcattaaggctttacaatccttgacttctaagggttacgtcaagactcaattcagttggcaatactactactacaccttgactgaagaaggtgttgaatacttgagagaatacttgaacttgccagaacacattgttccaggtacctacattcaagaaagaaacccaactcaaagaccacaaagaagatattga

SEQ ID NO: 10687 - DNA, 150 bp, Saccharomyces cerevisiae
atgaaattactatttctgaatattatagtcgtgcgccgccatttgcattgtaaaagctacagactatcaccatggtatatatatatatatggtgattatctgctatatacgacagaaataccatacaaaccgtttactcggcaaccttga

SEQ ID NO: 10688 - DNA, 150 bp, Artificial Sequence
  Description of Artificial Sequence: Synthetic polynucleotide
atgaaattactttttttgaatattatagtcgtgcgccgccatttgcattgtaaaagctacagattatctccatggtatatatatatatatggtgattatttattatatacgacagaaataccatacaaaccgtttactaggcaaccttga

SEQ ID NO: 10689 - DNA, 612 bp, Saccharomyces cerevisiae
atgtcagcagaagattacaagaacttaccagtcaccgttgaaaagcctatcccagtggtatacgatttgggtaacctggcagcattcgatagtaatgtcttggataaaaacgatttagattcttcgaatgctaggcgtgaagaaaagataaagagtcttactcgtgataatgttcagttactaatcaatcaactattatcactacctatgaaaacaacaacggagtctgtaggtggcaccggcggtcaaagttccgtgatgaccttgttgcagcttcctgaccctaccactgacttaccaagagaaaagccactgccaaaggctaaggctatgaccaaatgggagaagtttgcagctaagaagggtattaaaccaaaggaaagggcaggaaagatgatttatgatgaggcatccggtgaatgggttccaaagtggggctacaagggcgcaaataagaagttagatgatcaatggttggtggaagttgatgataaagtaaaaggcactgacaatgaattgatcgatccaagaactttgaatagggcagaaagaaaacgtttagtcaagaagaacgaaaaacaacaaaggagaaatatgaagaatgccttatga

SEQ ID NO: 10690 - DNA, 612 bp, Artificial Sequence
  Description of Artificial Sequence: Synthetic polynucleotide
atgtctgcagaagattacaagaacttaccagtcaccgttgaaaagcctatcccagtggtatacgatttgggtaacttggcagcattcgatagtaatgtcttggataaaaacgatttagattcttccaatgctaggcgtgaagaaaagataaagagtcttactcgtgataatgttcagttattgatcaatcaattattaagtttacctatgaaaacaacaacggagtctgtaggtggcaccggcggtcaaagttccgtgatgaccttgttgcagcttcctgaccctaccactgacttaccaagagaaaagccattaccaaaggctaaggctatgaccaaatgggagaagtttgcagctaagaagggtattaaaccaaaggaaagggcaggaaagatgatttatgatgaggcatccggtgaatgggttccaaagtggggctacaagggcgcaaataagaagttagatgatcaatggttggtggaagttgatgataaagtaaaaggcactgacaatgaattgatcgatccaagaactttgaatagggcagaaagaaaacgtttagtcaagaagaacgaaaaacaacaaaggagaaatatgaagaatgccttatga

SEQ ID NO: 10691 - DNA, 687 bp, Saccharomyces cerevisiae
atggctgaattaaacgattatagtacgatgatcgatattcttctctctgatatggatttggaaacggtcacaactaaaaaggttaggatggctttgaaagaagtatatgcaatcgacgttgaatcacagggaaaagcaattaacaaattgattaggaaacatctagatcttgtaaaagaaaggccgcgcttcgaaagatctcttgaggatctgctaaaggaaaatgctactttggcgattgagctcaccaaggaaattaccgtaagcaaacgatcatctggagaggaaaagaacgatagcgaaaccaaaggtactcatgttgagaagaaaaaagggactgttagtaagtcacctatttcaacacgaaaagttacactatctaaatcattagcgagtttgctaggagagcatgaattgacgaggaccgaagtagtacgacgactctgggcatatattaaagcgcataatctgcagaatcctaacaacaagaaagaaatactgtgcgacgaaaaattagaattaatacttggcaagagtaccaatatgtttgagatgcacaaaattttggcaagtcatatgacagagcctaaaaaaataagcgactgtcctcctcttatccaagaagtccgtagaaaggaaaagcccatcgtttcagattccgagcaatcagatacaaagggcatttga

SEQ ID NO: 10692 - DNA, 687 bp, Artificial Sequence
  Description of Artificial Sequence: Synthetic polynucleotide
atggctgaattaaacgattatagtacgatgatcgatattcttctctctgatatggatttggaaacggtcacaactaaaaaggttaggatggctttgaaagaagtatatgcaatcgacgttgaatctcagggaaaagcaattaacaaattgattaggaaacatttggatcttgtaaaagaaaggccgcgcttcgaaagatctcttgaggatttattgaaggaaaatgctactttggcgattgagctcaccaaggaaattaccgtaagcaaaagatcttctggagaggaaaagaacgatagcgaaaccaaaggtactcatgttgagaagaaaaaagggactgttagtaagtctcctatttctacaagaaaagttacattatctaaatctttagcgagtttgttgggagagcatgaattgacgaggaccgaagtagtaaggaggctctgggcatatattaaagcgcataatttacagaatcctaacaacaagaaagaaatattgtgcgacgaaaaattagaattaatacttggcaagagtaccaatatgtttgagatgcacaaaattttggcaagtcatatgacagagcctaaaaaaataagcgactgtcctcctcttatccaagaagtccgtagaaaggaaaagcccatcgtttctgattccgagcaatctgatacaaagggcatttga

SEQ ID NO: 10693 - DNA, 3870 bp, Saccharomyces cerevisiae
atgaatcgaacagtctccacattatcatctactgtatctgatgtatccgtggaaataccgtcaatatgcaacgtcattaataccgaattaccaacatcagatgtctatctttacactttaaaactaattttgttggattatatcaacgaaccgcgatttaaagaagcagctttgctatcgaataggacaggaacgtcaagggttttatctgacaaaacgaatcatcagcaaacgcaacatgggaagaaactagtggttgacaaacaagacgatatgtcggaacgcgatatagtacaggcaactttacgtatattaaaagggaagttggcacaaatttcaggaaataaaaacttggcgccgaatgagatgcattggaaaagtattgttaagatgtattatagcatgctcgattcttctagtgcagatacattttccaagatgggtcaaatggaggaggtggtcggttatttcacaaatattgccagtaatgaactaaagaaaatgactattaaaaattctcgtgacgagctgttcagtgaagttgcttattttatagacctagtaattgatgtacttccagatagttgtgcaaatatcataaagagactgcttgattataagattaatcttaaaaaaggcgagacaacagtaaagaagaaaagagccgcctcacctgccacagtccctcaatatagaagcatttccgggagcacgattagcaataagcaaccctctttcaaagtccaagatatttcacatatgaagtattttatgcagttattcgaaacagatgaaacaaagcttcaccaagacgtaatggctgttaaggacgattgtacaaatcccatattttgcggtgaactaagatatcttaggaaaaaaatcaagaaagacaacggtactttgacggcttctgatttttcaagtgacagagaatacaatttatggaagaattatgaacttcttgaaattgcaaatttaatggatcgatttgagataggcgaaaaggttacctctcacggaaaccgtcttatacccaaggatgcaaaaagcgtatttgtccgtctcataggccttgttttaaaaaaagagtgttctaatgctgtaaatgccataaatctttctcaagaagctctattcttctttcataaatcagcgaggtattggagaatagaatatccttccaccatctcctcgttggtttattcagcagcaaatttaagtgttctaggagatgaagagctaaatatcccaataactgaaaacttgttttctgtcatccgcaataaatatttatgttcagaggataatctggatccatccgcttggaatgctcaggatcgctatttatgggctgcaaacctttttcatacgactgatcagtctatgaggacaataaataaccttttaactgcgatattttcaggtacaaagccaaaattttctccagttttgtcattttattattcaaacattgttggggatccagtaatggaattctatgaaacgcagtccgtagctgtaaagaaatactggatcaaattatttaagaagactctttttaaagcatcagaggattattttgtctcccttctgcaggatatgctaaaggctaacgcaatagaaattcaaaacgttcagaatctcgtagaaacaattatagaagccataaaagcgattcaaaaacgttacaataaacctttattggacgaaatatctctgcctagacaatgcgcagtatttctatgtgaagtatacggttcggattctttaaatctaataaaaaccgctgaaaagagtaccatgaaaatgactggacaaaagttgggtccaatagatgcgctagatatgtatgatgtactgaaagaactgagacagatttacctgcaggtaaagccaaaagggaaatttttctttaaccttgaaaattatttcatcaaatatttgactcgattatgtgatgatgtgagccgtaatgttcaaaaagttattaaatcttcactagaaagcgagaattggcaacccgtaaatgaccaggaccatttcagtagatcagttttggacatattcaaaatgataaatgaatcaactagcatgttggagaaatttggttggcaaaatgaatttcaactggcacaaatgatcacggtaatattaaaggcgttttcagatggtatgctttcatactcagctcaactaatggaattgatccagagagatttacaggagggtgatgaaccatcctactctttagaaagctcagacactcgatcttcacttagcctgaataacgctaacgtaaatcatgaaaaatcaagaagtagtaggctgtttgaagatttgaaaaatgtagttaaatcaactccgaagatggtagctcctgctccatatcagttcaagaagcgtacgtgcgtactgctaaatgatcttgataaaacactttttctgttagagagcttcgaagaaaaagcagatccatcaaaaatatcctctgttattgcacagtaccactcctcccataatttagaggataatgggaagtcattcgatgaccagaatatgaagcaagtttatacccttcgaattatcggtgctgaaaatattaaaggcttcagcaaaacggggctttcaaacacctacgtttccatgagaaacatcactttacaacgggaaataggtactactaagattgttgcaagatcgattactcccaaatgggacgaagagtttgtgtttgagtctccattcggaaagtcgaacgatattatgtttactatatggcaccacccacacagcagattaaagaatttagcggaagatgatctatgtggaaaagccaatatgaaattcactccgagaaagctcaaggatgatgggtttcctatcgatttttcgctcacattgaatccgcagggaactttatattgccaaatatccctggaaagtgagaaaatagatgccgtttcttctatgggaagaatatatagatcttttagcaggtcaagagatcgtgcaataaacctaatagtcaacaaattttctgattttattgcatttgccttctcgagaaccacattaaaaacagtgtgtggtcaccatggttctgcacttgcgtctgacgaagcagtatatgacgcaattttaccactatttgactatttaaacgcaaatttgaacattctggcatcagaactttcacagagattgttgtttatggtaatgctaagagcgtggaacctcgttttagagaacgctgatttacttcttctacctgcattgaatagcgctaaagttaatatattgcgttcagcaaagaaatctttgtgggaaaatactctttcaaccacaaaaacggtatcaggatacggtcgtcctttgactcaagcggaaatcgaggctgtattcaaatggcttgatgcgctgtgtgtagatttttttcataataaaggagaaggtccccctcttgcagaattgaaaaatgagtattaccaaaatatattgctgatcccagctttttatgataaaagtgtctccgaattgaaggatgaagttcagcgattgattcccctatatgaagagtatttgagatggttttatctgaagaaaactccgattacttttacgaataaatccgctggaacaatatctcgaaaaaagtcgctagtagctaacattgtaaaagagcctaaggaacaactggaacgtgatgcagaagtaatgaatattatattgagaatattgatcgcgaaaggccaacatgattacgttcatcgaattttacatgacagaaaagaacttgttaatactatgaaaaatagaagagcggtgagtagagcggtcactcctacaggaaaaaagggcagaaactga

SEQ ID NO: 10694 - DNA, 3870 bp, Artificial Sequence
  Description of Artificial Sequence: Synthetic polynucleotide
atgaatagaacagtctccacattatcttctactgtatctgatgtatccgtggaaataccgagcatatgcaacgtcattaataccgaattaccaacatctgatgtctatctttacactttaaaattgattttgttggattatatcaacgaaccgagatttaaagaagcagctttgctttctaataggacaggaacgtctagggttttatctgacaaaacgaatcatcagcaaacgcaacatgggaagaaattagtggttgacaaacaagacgatatgtctgaacgcgatatagtacaggcaactttacgtatattaaaagggaagttggcacaaatttctggaaataaaaacttggcgccgaatgagatgcattggaaaagtattgttaagatgtattatagcatgctcgattcttctagtgcagatacattttccaagatgggtcaaatggaggaggtggtcggttatttcacaaatattgccagtaatgaattgaagaaaatgactattaaaaattctcgtgacgagcttttcagtgaagttgcttattttatagacttggtaattgatgtacttccagatagttgtgcaaatatcataaagagattacttgattataagattaatcttaaaaaaggcgagacaacagtaaagaagaaaagagccgcctctcctgccacagtccctcaatatagaagcatttccgggagcacgattagcaataagcaaccctctttcaaagtccaagatatttctcatatgaagtattttatgcagttattcgaaacagatgaaacaaagcttcaccaagacgtaatggctgttaaggacgattgtacaaatcccatattttgcggtgaattgagatatcttaggaaaaaaatcaagaaagacaacggtactttgacggcttctgatttttctagtgacagagaatacaatttatggaagaattatgaacttcttgaaattgcaaatttaatggatagatttgagataggcgaaaaggttacctctcacggaaaccgtcttatacccaaggatgcaaaaagcgtatttgtccgtctcataggccttgttttaaaaaaagagtgttctaatgctgtaaatgccataaatctttctcaagaagctttattcttctttcataaatctgcgaggtattggagaatagaatatccttccaccatctcctctttggtttattctgcagcaaatttaagtgttttaggagatgaagagttgaatatcccaataactgaaaacttgttttctgtcatccgcaataaatatttatgttctgaggataatttggatccatccgcttggaatgctcaggatcgctatttatgggctgcaaacctttttcatacgactgatcagtctatgaggacaataaataaccttttaactgcgatattttctggtacaaagccaaaattttctccagttttgagtttttattattccaacattgttggggatccagtaatggaattctatgaaacgcagtccgtagctgtaaagaaatactggatcaaattatttaagaagactctttttaaagcaagtgaggattattttgtctcccttttacaggatatgttgaaggctaacgcaatagaaattcaaaacgttcagaatctcgtagaaacaattatagaagccataaaagcgattcaaaaacgttacaataaacctttattggacgaaatatctttgcctagacaatgcgcagtatttttatgtgaagtatacggttctgattctttaaatttgataaaaaccgctgaaaagagtaccatgaaaatgactggacaaaagttgggtccaatagatgcgttggatatgtatgatgtattgaaagaattgagacagatttacttacaggtaaagccaaaagggaaatttttctttaaccttgaaaattatttcatcaaatatttgactagattatgtgatgatgtgagccgtaatgttcaaaaagttattaaatcttctttggaaagcgagaattggcaacccgtaaatgaccaggaccatttcagtagatctgttttggacatattcaaaatgataaatgaatctactagcatgttggagaaatttggttggcaaaatgaatttcaattggcacaaatgatcacggtaatattaaaggcgttttctgatggtatgctttcttactctgctcaattgatggaattgatccagagagatttacaggagggtgatgaaccatcctactctttagaaagcagtgacactagatcttctcttagcttgaataacgctaacgtaaatcatgaaaaatctagaagtagtaggttatttgaagatttgaaaaatgtagttaaatctactccgaagatggtagctcctgctccatatcagttcaagaagcgtacgtgcgtattattgaatgatcttgataaaacactttttttattagagagcttcgaagaaaaagcagatccatctaaaatatcctctgttattgcacagtaccactcctcccataatttagaggataatgggaagagtttcgatgaccagaatatgaagcaagtttatacccttagaattatcggtgctgaaaatattaaaggcttcagcaaaacggggctttccaacacctacgtttccatgagaaacatcactttacaaagagaaataggtactactaagattgttgcaagatctattactcccaaatgggacgaagagtttgtgtttgagtctccattcggaaagtctaacgatattatgtttactatatggcaccacccacacagcagattaaagaatttagcggaagatgatttatgtggaaaagccaatatgaaattcactccgagaaagctcaaggatgatgggtttcctatcgatttttctctcacattgaatccgcagggaactttatattgccaaatatccttagaaagtgagaaaatagatgccgtttcttctatgggaagaatatatagatcttttagcaggagcagagatcgtgcaataaacttgatagtcaacaaattttctgattttattgcatttgccttcagtagaaccacattaaaaacagtgtgtggtcaccatggttctgcacttgcgtctgacgaagcagtatatgacgcaattttaccattatttgactatttaaacgcaaatttgaacattttggcatctgaactttctcagagattgttgtttatggtaatgttgagagcgtggaacctcgttttagagaacgctgatttacttcttttacctgcattgaatagcgctaaagttaatatattgcgttctgcaaagaaatctttgtgggaaaatactctttctaccacaaaaacggtatctggatacggtcgtcctttgactcaagcggaaatcgaggctgtattcaaatggcttgatgcgttatgtgtagatttttttcataataaaggagaaggtccccctcttgcagaattgaaaaatgagtattaccaaaatatattgttgatcccagctttttatgataaaagtgtctccgaattgaaggatgaagttcagcgtttgattcccttatatgaagagtatttgagatggttttatttgaagaaaactccgattacttttacgaataaatccgctggaacaatatctagaaaaaagtctttagtagctaacattgtaaaagagcctaaggaacaattggaacgtgatgcagaagtaatgaatattatattgagaatattgatcgcgaaaggccaacatgattacgttcatagaattttacatgacagaaaagaacttgttaatactatgaaaaatagaagagcggtgagtagagcggtcactcctacaggaaaaaagggcagaaactga

SEQ ID NO: 10695 - DNA, 579 bp, Saccharomyces cerevisiae
atgctattgtttcctggcttgaagcctgttcttaatgcttccactgtcattgtaaatcctgtacgagctgtttttccaggattagtactttcaaccaaaagatccttttatagcattaatcgtttaaatgctgaaaataaaataaacgatattgcaaatacgtcaaaagaggcatcctcttcagtgcagatgtttaagcccccagagttctctcaatttaaggactcttatcaaaaagactatgagagaatagcaaaatatactttgattccattaacaatggtacctttttatgcctcctttaccggcggggttataaatcctttactcgatgcgtctttatcgtccatttttttgatatatttacagtatggcttcacaagttgtattattgactatataccgaaggaaaagtatccaagatggcataagctcgccctttattgcctctatggaggatccatgttgtccctgtacggtatctacgaattggaaacgaaaaataatggttttgttgacctggtaaagaaactttggaatgaaaatgatgaccatttgtatatatttggaagaaactga

SEQ ID NO: 10696 - DNA, 579 bp, Artificial Sequence
  Description of Artificial Sequence: Synthetic polynucleotide
atgcttttgtttcctggcttgaagcctgttcttaatgcttccactgtcattgtaaatcctgtaagagctgtttttccaggattagtactttctaccaaaagatccttttatagcattaatcgtttaaatgctgaaaataaaataaacgatattgcaaatacgtccaaagaggcatcctcttctgtgcagatgtttaagcccccagagttctctcaatttaaggactcttatcaaaaagactatgagagaatagcaaaatatactttgattccattaacaatggtacctttttatgcctcctttaccggcggggttataaatcctttactcgatgcgtctttatcttccatttttttgatatatttacagtatggcttcacaagttgtattattgactatataccgaaggaaaagtatccaagatggcataagctcgccctttattgcctctatggaggatccatgttgtccttgtacggtatctacgaattggaaacgaaaaataatggttttgttgacttggtaaagaaactttggaatgaaaatgatgaccatttgtatatatttggaagaaactga

SEQ ID NO: 10697 - DNA, 1440 bp, Saccharomyces cerevisiae
atgggttttgttgatttcttcgaaacatatatggtcggttctagggtccagttcaaacagttagatatttctgattggttgagtctgaccccaaggttgcttattctttttggctatttttaccttcattctttttttactgcaatcaatcaattcctacagttcattaacacgaattccttctgtcttagactgcatttactatatgacagattttggtcgcatgtgcccataataggtgagtacaaaattcggctgctctcgagggcactgacatatagtaaactgaaaataataccaactttagacaaggtgctggaggcgattgaaatttggtttcagctacatttagttgaaatgaccttcgaaaaaaaaaaaaacgtccaaattttcataaccgagggaagtgatgacctaaacttttttaaagatagcaaattccaaaccacattaatgatatgtaatcatcgatcagtgaatgactacacattgattaattacctttttctcaaaagttgtcccaccaagttttatactaaatgggaatttctacaaaagctgaggaagggggaagatctagctgaatggcctcagttaaaatttcttggttggggaaaaatgtttaactttcctcgattggatctactaaagaacatattcttcaaagatgaaacactcgcactctcatcgaatgagttaagagatattttagaaagacaaaacaatcaagctattactatttttcccgaagtcaatatcatgagtttggaactatcaattattcaaagaaaattacaccaagattttccctttgttataaacttctataatttattatacccaagatttaaaaactttaccactttgatggctgctttttcatcaattaaaaacatcaaaagaaagaaaaaccgtaacaatataatcaaagaggcccgatacctgtttcacagagaacttgacaaattagttcacaagagcatgaaaatggagtcttccaaggtatccgataagacgacgccgcccatgatcgtagataattcatacttacttacaaaaaaggaagaaatcagcagcggcaagcccaaggtggtacgaatcaatccatacatatatgatgtcaccataatttattaccgagtcaaatatactgatagtgggcatgatcataccaacggagatttgagacttcataaaggttatcaattagagcaaatatctccgacaatctttgagatgattcaaccagaaatggagtctgaaaacaacataaaggataaggaccccattgttgtgatggtaaatgtaaaaaagcatcaaattcaaccattactcgcatacaatgatgagagtttagaaaagtggcttgaaaataggtggatagaaaaagatagattaatcgagtccttgcaaaaaaatattaaaattgagaccaaataa

SEQ ID NO: 10698 - DNA, 1440 bp, Artificial Sequence
  Description of Artificial Sequence: Synthetic polynucleotide
atgggttttgttgatttcttcgaaacatatatggtcggttctagggtccagttcaaacagttagatatttctgattggttgagtttaaccccaaggttgcttattctttttggctatttttaccttcattctttttttactgcaatcaatcaattcttacagttcattaacacgaattccttctgtcttagattacatttattatatgacagattttggtctcatgtgcccataataggtgagtacaaaattagattactctccagggcattaacatatagtaaattgaaaataataccaactttagacaaggtgttggaggcgattgaaatttggtttcagttacatttagttgaaatgaccttcgaaaaaaaaaaaaacgtccaaattttcataaccgagggaagtgatgacttgaacttttttaaagatagcaaattccaaaccacattaatgatatgtaatcatagatctgtgaatgactacacattgattaattacctttttctcaaaagttgtcccaccaagttttatactaaatgggaatttttgcaaaagttaaggaagggggaagatttggctgaatggcctcagttaaaatttcttggttggggaaaaatgtttaactttcctagattggatttattgaagaacatattcttcaaagatgaaacactcgcactctcttccaatgagttaagagatattttagaaagacaaaacaatcaagctattactatttttcccgaagtcaatatcatgagtttggaattatccattattcaaagaaaattacaccaagattttccctttgttataaacttctataatttattatacccaagatttaaaaactttaccactttgatggctgctttttcttccattaaaaacatcaaaagaaagaaaaaccgtaacaatataatcaaagaggccagatacttgtttcacagagaacttgacaaattagttcacaagagcatgaaaatggagtcttccaaggtatccgataagacgacgccgcccatgatcgtagataattcttacttacttacaaaaaaggaagaaatcagcagcggcaagcccaaggtggtaagaatcaatccatacatatatgatgtcaccataatttattacagagtcaaatatactgatagtgggcatgatcataccaacggagatttgagacttcataaaggttatcaattagagcaaatatctccgacaatctttgagatgattcaaccagaaatggagtctgaaaacaacataaaggataaggaccccattgttgtgatggtaaatgtaaaaaagcatcaaattcaaccattactcgcatacaatgatgagagtttagaaaagtggcttgaaaataggtggatagaaaaagatagattaatcgagtccttgcaaaaaaatattaaaattgagaccaaatga

SEQ ID NO: 10699 - DNA, 456 bp, Saccharomyces cerevisiae
atgtctgactgggatacaaatactattattggtagcagagcaagagctggtggttctggcccaagggccaacgttgccagatctcaaggccaaattaatgctgcaagaagacaggggttggttgtttccgttgacaagaagtacggatcaaccaatacgaggggtgacaacgagggtcagaggttgaccaaggtcgaccgtgagacagatattgtcaaacccaagaaattggatccaaatgtcggtagggccatctcgcgtgccagaacagacaagaaaatgtcgcagaaggatttggcaaccaaaattaacgaaaagccaaccgtggtaaacgattatgaagccgctagagctattccaaaccaacaagttttgtctaagttggaaagagccttaggcgttaaattgagaggtaacaacatcggttcgcctttgggagctccaaagaagaaatga

SEQ ID NO: 10700 - DNA, 456 bp, Artificial Sequence
  Description of Artificial Sequence: Synthetic polynucleotide
atgtctgactgggatacaaatactattattggtagcagagcaagagctggtggttctggcccaagggccaacgttgccagatctcaaggccaaattaatgctgcaagaagacaggggttggttgtttccgttgacaagaagtacggatctaccaatacgaggggtgacaacgagggtcagaggttgaccaaggtcgaccgtgagacagatattgtcaaacccaagaaattggatccaaatgtcggtagggccatctctcgtgccagaacagacaagaaaatgtctcagaaggatttggcaaccaaaattaacgaaaagccaaccgtggtaaacgattatgaagccgctagagctattccaaaccaacaagttttgtctaagttggaaagagccttaggcgttaaattgagaggtaacaacatcggttctcctttgggagctccaaagaagaaatga

SEQ ID NO: 10701 - DNA, 2241 bp, Saccharomyces cerevisiae
atgattacgcagaattctataccagaggtaaaagaagattttattggttatgctttacatgagagaagaattcggttaccgcagtttcaagacttagggccggcagacttggtcacactaacaaagtatttgcccacttcaagtaacacaaatgccataaacagtacgagtagaaatggtgcggccattattcagtcccctgcagccgttgtagccgatgactctgccgcttccatggcaaccaatggcgatgctagtgacaccgccgttaccacaaattatacaaatgcatctatatacagtagcagcagaaatgccaatgatggagccccgatggtcgctgagctccatccacttgataaactgaaggacgaagtagggacatttttttactcaatgggtgtcgatacatccggtccaacttcaatcgcaatttttttgaaggagatttcagaggtcatcagcgagaaaccccaagtttggtttggcaggaagaaaaccttcaatgttgctcgaatttcattttccacttggaatgcgttcaggagatgcgacataaatgtcgtcgttcatattccaggatcgattcagaactttatagtggattgcaacggtgaaagtcaaaatatagagatgtgtgcggattatgacttaatttgggctgaaacgttcgtaagtggcgtagtacggtcaatcatgttaatgaaggaaaacgctgaagagggagaattacaaaatttagtggaaaccttgattttgaacccgtttactgcaggacaaatcgacgatgtaccagaaatgttcattgatctgttccctatagtttaccataagggcccattattgggagctccgtattatattaccaatgtgacgaacactaataactatttggtagaaacactcgttgagatagttaagctgactcgtaatgttagcagggcggaaataatgttgaagaatctggctaccgacaaccctgaggcgatcataatactaatcaagatctttttggtgtgtgatcaagaattagacgcaataaagctcacatacgatatgctttcgcaggataaaataataaacaacactaataaccgcatggattataaatctgaattactgtgcttacaagcgcaatttttgatagacaaaaggcaggattacagcttggcgcaaaacatagcgcaagaggcagtcaattgttctcccagtgaatttagaccttggtatcttttatccaaggtgtatgtaaagctaaatgatattgaaaatgccttactgatactgaattcatgccctatgtctccattaaaggaaaaatacgtactgaaaagagtagctccgttgccttcgaataatagtcttcatttgccattgccaattgacgttgtactggatgaagtgacgtcgttgaatccacaagacgttcagaatgaacaccgctctgcggatccaatgctggtcaatttagctgcgtcgaacttgaaatctactttccaattggcataccgattattgacagaaattgtgcagatcaccggctgggaaaatctgttaaagtacagatcaaacattttcgttatggaagaagagtaccaaaaatcatcatcttcgttaccaaaggacgttaacaaacaagaagaacagcctctgagggctaaacggctgtgtgaacgatggttagacaacctcttcatgcttttatatgaagacctgaagatgtatacattatggcaaaccgaacaactgtacatggatgcacagaataacaaccacaataagttgactttcgaatgggagttatttggcctttgtgcacgtcgactgggccatttccctgaggccgccaaggccttccagaacggtttatcgcagagattttcatcaaggtgcgcgaggaaactgctggaatattgtataaacgaacgccaacgggtcaaaaattttataaactcacctaattcgcatgacatggtccctgaaatagtaagctcacgcataagagagctagacaatagcattatcgacctttgcgtgaagatatgctgctggaaccaccgttggtatacggaattttccataagtttacttgattgtttaagtgtggttattcaagatatgagtctgaccaaagtttcgaatgaaatctcgtcaagatatccagaaactgttctcaacttggtgcaggagaatttgctcaatttcttcactacttgcaccattggatgctacgatgcataa

SEQ ID NO: 10702 - DNA, 2241 bp, Artificial Sequence
  Description of Artificial Sequence: Synthetic polynucleotide
atgattacgcagaattctataccagaggtaaaagaagattttattggttatgctttacatgagagaagaattagattaccgcagtttcaagacttagggccggcagacttggtcacattaacaaagtatttgcccacttctagtaacacaaatgccataaacagtacgagtagaaatggtgcggccattattcagtcccctgcagccgttgtagccgatgactctgccgcttccatggcaaccaatggcgatgctagtgacaccgccgttaccacaaattatacaaatgcatctatatacagtagcagcagaaatgccaatgatggagccccgatggtcgctgagctccatccacttgataaattgaaggacgaagtagggacatttttttactccatgggtgtcgatacatccggtccaacttctatcgcaatttttttgaaggagatttctgaggtcatcagcgagaaaccccaagtttggtttggcaggaagaaaaccttcaatgttgctagaatttccttttccacttggaatgcgttcaggagatgcgacataaatgtcgtcgttcatattccaggatctattcagaactttatagtggattgcaacggtgaaagtcaaaatatagagatgtgtgcggattatgacttaatttgggctgaaacgttcgtaagtggcgtagtaagatctatcatgttaatgaaggaaaacgctgaagagggagaattacaaaatttagtggaaaccttgattttgaacccgtttactgcaggacaaatcgacgatgtaccagaaatgttcattgatcttttccctatagtttaccataagggcccattattgggagctccgtattatattaccaatgtgacgaacactaataactatttggtagaaacactcgttgagatagttaagttgactcgtaatgttagcagggcggaaataatgttgaagaatttggctaccgacaaccctgaggcgatcataatattgatcaagatctttttggtgtgtgatcaagaattagacgcaataaagctcacatacgatatgctttctcaggataaaataataaacaacactaataaccgcatggattataaatctgaattattatgcttacaagcgcaatttttgatagacaaaaggcaggattacagcttggcgcaaaacatagcgcaagaggcagtcaattgttctcccagtgaatttagaccttggtatcttttatccaaggtgtatgtaaagttgaatgatattgaaaatgccttattgatattgaattcttgccctatgtctccattaaaggaaaaatacgtattgaaaagagtagctccgttgccttccaataatagtcttcatttgccattgccaattgacgttgtattggatgaagtgacgtctttgaatccacaagacgttcagaatgaacaccgctctgcggatccaatgcttgtcaatttagctgcgtccaacttgaaatctactttccaattggcatacagattattgacagaaattgtgcagatcaccggctgggaaaatttattaaagtacagatctaacattttcgttatggaagaagagtaccaaaaatcttcttcttctttaccaaaggacgttaacaaacaagaagaacagcctttaagggctaaaagattatgtgaaagatggttagacaacctcttcatgcttttatatgaagacttgaagatgtatacattatggcaaaccgaacaattgtacatggatgcacagaataacaaccacaataagttgactttcgaatgggagttatttggcctttgtgcacgtaggttgggccatttccctgaggccgccaaggccttccagaacggtttatctcagagattttcttccaggtgcgcgaggaaattattggaatattgtataaacgaacgccaaagagtcaaaaattttataaactctcctaattctcatgacatggtccctgaaatagtaagcagccgcataagagagttggacaatagcattatcgacctttgcgtgaagatatgctgctggaaccaccgttggtatacggaattttccataagtttacttgattgtttaagtgtggttattcaagatatgagtttaaccaaagtttctaatgaaatctcttctagatatccagaaactgttctcaacttggtgcaggagaatttgctcaatttcttcactacttgcaccattggatgctacgatgcatga

SEQ ID NO: 10703 - DNA, 1308 bp, Saccharomyces cerevisiae
atgaaggaagagctcagcaaagtgagcagtatgcaaaatttcgagatgatccagcgtgaacgattgccaacattgtatgaagtgttaatacagaggacatcgcagccagttgatctctggactttttatacatttctttcacaattcccatatgccatcaactatctggacttttgggttgaccttatgacacatacacgactttgcaaaaactacatagagttggtaagaaaatcattaatcaactttccacaagaacaacagcagaatggaagtacatctacggctacatttgacttgctgaacgcactgatagaagaagggcacctagacccggaagcacctgataaactcttagaaaatagcggcccagacgtgcccttttcaccaaaattaaacgaattgctgggtgattggaagcaccaatcgggtatcggtcaagaagccctgagaaacgaagacgtagcgctgatcgtcgacgagataatgaaaaggcgctcccaacaagacggaaaaccgcagataactacaaaacaactgctgcacagcgcagttggtctctgcaacacctatttagtatcgcccgaacaaagcgaacggtacctgagcaacatccccatggaaacgcggaaccgcataatagaaagcgtacaaatcgagcgaaagtacgacattgagatttttgacgacctaaaaaacctaacttaccaattcctagaaatggattgtttcccaaaatttctaagccgcgtcgcactacacaacatccacgatgaaatatctgattggagattccactcagtgggcgtcaccaacgaaaaaagcaatcgctctcgaggccagacgcacatttctcgctcgccattctccaatcacacgtcaatcagtcgtattggctttggtttgctctggctaggcatcggcttttggatcggatatgttctaatcttcctggcgtatagtcgcgcaatccgtgtcgttacggtcgtgccatttacactgggatgctactgcattgtgtgtggcatgtatcaagtggacattgtgtattcctggtttggcgtcacacagagacttctccacagacacaaaaacgctggcaatgacgaaggagatgcttctagtgataccgatcacgtgccaatgatacttgcggtgttcggcggtaggcgccgtcttacccgcatagagcacccatttactcggcagcttctacgtaagcgtggactgtggtgtctgcttctcgtagtgggtgccactgccgcattcacagttattttcagctgtgttcccggccgtcgtgtatga

SEQ ID NO: 10704 - DNA, 1308 bp, Artificial Sequence
  Description of Artificial Sequence: Synthetic polynucleotide
atgaaggaagagctcagcaaagtgagcagtatgcaaaatttcgagatgatccagcgtgaaagattgccaacattgtatgaagtgttaatacagaggacatctcagccagttgatctctggactttttatacatttctttctcaattcccatatgccatcaactatttggacttttgggttgaccttatgacacatacaagactttgcaaaaactacatagagttggtaagaaaatctttaatcaactttccacaagaacaacagcagaatggaagtacatctacggctacatttgacttgttgaacgcattaatagaagaagggcacttagacccggaagcacctgataaactcttagaaaatagcggcccagacgtgcccttttctccaaaattaaacgaattgttgggtgattggaagcaccaatctggtatcggtcaagaagccttgagaaacgaagacgtagcgttgatcgtcgacgagataatgaaaaggcgctcccaacaagacggaaaaccgcagataactacaaaacaattattacacagcgcagttggtctctgcaacacctatttagtatctcccgaacaaagcgaaagatacttgagcaacatccccatggaaacgagaaaccgcataatagaaagcgtacaaatcgagagaaagtacgacattgagatttttgacgacttgaaaaacttgacttaccaattcttggaaatggattgtttcccaaaatttttgagccgcgtcgcattgcacaacatccacgatgaaatatctgattggagattccactctgtgggcgtcaccaacgaaaaaagcaatcgctctcgtggccagacgcacatttctcgcagtccattctccaatcacacgtccatcagtcgtattggctttggtttgctctggttaggcatcggcttttggatcggatatgttttgatcttcttggcgtatagtcgcgcaatccgtgtcgttacggtcgtgccatttacattaggatgctactgcattgtgtgtggcatgtatcaagtggacattgtgtattcctggtttggcgtcacacagagacttctccacagacacaaaaacgctggcaatgacgaaggagatgcttctagtgataccgatcacgtgccaatgatacttgcggtgttcggcggtaggcgccgtcttacccgcatagagcacccatttactagacagcttttgcgtaagcgtggattatggtgtttgcttctcgtagtgggtgccactgccgcattcacagttattttcagctgtgttcccggccgtcgtgtatga

SEQ ID NO: 10705 - DNA, 78 bp, Saccharomyces cerevisiae
atgtttagcttatcgaactctcaatacacctgccaagactacatatctgaccacatctggaaaactagctcccactaa

SEQ ID NO: 10706 - DNA, 78 bp, Artificial Sequence
  Description of Artificial Sequence: Synthetic oligonucleotide
atgtttagcttatctaactctcaatacacctgccaagactacatatctgaccacatctggaaaactagctcccactga

SEQ ID NO: 10707 - DNA, 1236 bp, Saccharomyces cerevisiae
atgtcctccgctgcaacaaaagctactttctgtatccaaaatggtccttcctttgaaggtatatcttttggtgcaaacaaatctgttgctggtgaaacagttttcactacttctctggttggttacccagagtccatgactgatccttcctaccgtggtcagatattagtcttcacgcaacccttgattggtaactacggtgtcccatccggcgaagcccgcgatgaatacaatttactgaagtattttgaatctccgcatatacatgtggtcggcatcgttgtcgctgaatatgcttatcaatattcgcattggaccgctgttgaatctctggcacaatggtgtcagagagaaggtgttgctgctattactggcgtagacacccgtgaactagtgcaatacttgagggaacaaggttcttctttgggccgtattacgttggctgatcatgaccctgtcccctacgtgaatcccatgaaaactaacttggttgctcaagtcaccacaaaaaagcctttccacgtctctgccttacctgggaaggctaaggcaaatgtggctcttattgactgtggtgttaaagaaaacattatcagatgcctagtcaaaagaggtgccaatgtaactgttttcccctatgattacagaattcaagatgttgcttctgaattcgacggtattttcttatccaatggaccaggcaacccagaactatgccaagctacaatttccaacgtcagggaattactaaataaccctgtttatgactgtatccctatttttgggatttgtctaggccatcaactcttggctctggcctccggtgcctctactcacaaattgaaatatggtaatagggctcacaacatccctgccatggatttgactaccggccagtgccacattacatctcaaaatcatggctatgcagttgatcctgagaccctaccaaaggaccaatggaaaccttattttgttaatttaaacgacaaatcaaacgaaggcatgatacaccttcaaagacccatattttctacccaatttcacccagaggcaaaaggtggtcccttagacacagctattctttttgacaaattcttcgataatatagaaaaataccaattacaatctcaggcaaaaagttcaatctcactaaaagtaacatacagtaccgataaatcgagattgcagagtataaatgttactaagttggccaaggaaagagtgttgttctaa

SEQ ID NO: 10708 - DNA, 1236 bp, Artificial Sequence
  Description of Artificial Sequence: Synthetic polynucleotide
atgtcctccgctgcaacaaaagctactttctgtatccaaaatggtccttcctttgaaggtatatcttttggtgcaaacaaatctgttgctggtgaaacagttttcactacttctttggttggttacccagagtccatgactgatccttcctaccgtggtcagatattagtcttcacgcaacccttgattggtaactacggtgtcccatccggcgaagcccgcgatgaatacaatttattgaagtattttgaatctccgcatatacatgtggtcggcatcgttgtcgctgaatatgcttatcaatattctcattggaccgctgttgaatctttggcacaatggtgtcagagagaaggtgttgctgctattactggcgtagacacccgtgaattagtgcaatacttgagggaacaaggttcttctttgggccgtattacgttggctgatcatgaccctgtcccctacgtgaatcccatgaaaactaacttggttgctcaagtcaccacaaaaaagcctttccacgtctctgccttacctgggaaggctaaggcaaatgtggctcttattgactgtggtgttaaagaaaacattatcagatgcttagtcaaaagaggtgccaatgtaactgttttcccctatgattacagaattcaagatgttgcttctgaattcgacggtattttcttatccaatggaccaggcaacccagaattgtgccaagctacaatttccaacgtcagggaattattgaataaccctgtttatgactgtatccctatttttgggatttgtttgggccatcaactcttggctttggcctccggtgcctctactcacaaattgaaatatggtaatagggctcacaacatccctgccatggatttgactaccggccagtgccacattacatctcaaaatcatggctatgcagttgatcctgagaccttgccaaaggaccaatggaaaccttattttgttaatttaaacgacaaaagtaacgaaggcatgatacaccttcaaagacccatattttctacccaatttcacccagaggcaaaaggtggtcccttagacacagctattctttttgacaaattcttcgataatatagaaaaataccaattacaatctcaggcaaaaagttctatctctttgaaagtaacatacagtaccgataaatctagattgcagagtataaatgttactaagttggccaaggaaagagtgttgttctga

SEQ ID NO: 10709 - DNA, 3363 bp, Saccharomyces cerevisiae
atgacgacccagcaagaggagcaacgaagtgataccaagaatagcaaaagcgagtcaccttcagaagttttagtcgatactctcgactcaaagtcaaatggcagtagtgatgatgataatatcggacaaagtgaagagctatcagataaagaaatatatacagtagaagatagaccaccagaatattgggctcaaagaaagaaaaaattcgtacttgatgtagatccaaaatacgccaagcaaaaggacaagtccgatacgtacaaaagattcaaatatttattaggcgtcacagaccttttccgtcattttattggaattaaggcaaaacatgataaaaatattcaaaaactcttaaaacagttagattctgatgcaaacaaactttccaaatcacacagcaccgtcagttcgtcatcacgtcaccatagaaaaacagaaaaggaggaagatgctgaattaatggctgatgaggaagaagagattgtagatacatatcaggaagacatattcgtctcagaatctccctccttcgtcaagtcaggaaaattaagagactatcaagttcaaggcttaaactggttaatatcgttgcacgaaaacaaactatctggtatcttggccgatgaaatggggctgggtaaaaccttacaaacaatttcattcctaggttatttgagatacgtcaaacaaatcgagggaccctttctaataatagtaccgaagtcaacactagataattggagacgagagtttcttaaatggactccaaacgtcaatgtccttgtgttacatggtgataaagacacaagagctgatatagtacggaatataatattagaagctagatttgatgtattgattacatcttatgaaatggtcattagagaaaagaatgctttgaaaagattagcttggcaatatattgttattgatgaggctcacaggatcaaaaatgaacaaagcgcgttatctcaaataattagattattttactctaagaatagattattgattacgggcacgcctctacaaaacaatctacacgaattatgggccctgctaaatttcttattacctgatatatttggagattctgaactttttgatgaatggttcgaacaaaacaattcggaacaagatcaagaaattgtaatccaacagctacactcagtactaaacccctttttactgagaagagtcaaagcggatgtcgaaaaatctttgctacctaaaatcgaaacgaatgtttacgtggggatgacagacatgcaaatacaatggtataaatcattattagagaaggatatagacgctgttaacggtgctgttggaaaaagagaaggcaaaacgaggttactgaatattgttatgcaattaaggaaatgctgtaatcatccatatctttttgaaggcgcagaacctggacctccatacactaccgatgaacatttgattttcaattccgggaaaatgattatattagataagttactgaaaagactgaaggaaaagggatctagagtattgattttcagtcaaatgtcgagactattggatatcttagaagattattgctattttagagattttgaatattgcagaatcgacggttctactagccatgaagaacgtatagaagctatcgatgagtataataaacctaattctgaaaagttcgtttttttgctaacaacacgtgccggtggtttaggtattaaccttgtcacagccgacactgttattctttttgattctgattggaaccctcaagctgatctacaagcaatggatagagcgcatagaattggtcaaaagaaacaagttcatgtttatagatttgtcacagaaaatgctattgaagagaaagtcattgagcgtgccgcacaaaagctgagactagaccagttggttatccaacagggcacgggcaagaaaactgcatctcttggtaactcaaaggatgatctgttggatatgattcaatttggcgctaaaaatatgtttgaaaagaaagcaagtaaagtcactgttgatgctgatatcgatgatattttgaaaaagggggaacagaagacacaagaactaaatgccaaataccaaagtttaggacttgacgacttacaaaagttcaatgggatcgagaaccaatctgcttacgaatggaatggtaaaagctttcaaaaaaaatccaacgacaaagtagttgaatggattaatccttcccgaagagaaagaagaagagagcaaaccacttattcagttgacgattattataaggaaattattggtggtggctctaaatcagcaagcaagcaaactccgcagccaaaagcaccccgcgctccaaaggttatacacggtcaagatttccagttcttccccaaggagttggatgccttacaagaaaaggaacagctttacttcaagaaaaaggtcaactataaggttacttcttatgatattacgggagatatacgtaatgaaggaagcgatgctgaagaagaagaaggagaatacaaaaatgccgctaatacagaaggtcataaaggccatgaggaacttaaaagaaggattgaggaggagcaagagaagattaattcagcaccggattttacccaagaagatgaattacgaaagcaagaattgatatcaaaagcctttactaactggaataagagggactttatggcgtttatcaacgcctgcgccaaatacggtagagatgatatggaaaacattaagaaatctattgattccaaaacaccagaagaggttgaagtgtatgcaaaaatattctgggaaagactaaaggaaatcaatgggtgggagaagtatttacataatgtagaacttggtgaaaaaaaaaatgaaaaactgaaattccaggaaactctattgaggcagaaaatcgaacagtgtaaacatccattacatgagctgataatacagtatccacctaataatgctagaagaacttacaataccttagaagataaatttttattattagctgttaacaagtacggacttcgtgctgacaagctctatgaaaaattaaagcaagaaatcatgatgagtgatttgttcacttttgattggtttataaagacaagaacggtgcatgagctatcaaaaagagtccatacgctattaactttaattgtaagagagtatgagcaacctgacgcaaataagaagaaaaggagtagaacttcagcgactagagaggatactcctttatcccaaaatgaaagcactagagcttcaacggttccaaatctcccgacgacgatggtgacaaatcaaaaagatacaaacgatcatgttgataaaagaaccaaaattgatcaagaagcatga

SEQ ID NO: 10710 - DNA, 3363 bp, Artificial Sequence
  Description of Artificial Sequence: Synthetic polynucleotide
atgacgacccagcaagaggagcaaagaagtgataccaagaatagcaaaagcgagtctccttctgaagttttagtcgatactctcgactccaagagcaatggcagtagtgatgatgataatatcggacaaagtgaagagttaagtgataaagaaatatatacagtagaagatagaccaccagaatattgggctcaaagaaagaaaaaattcgtacttgatgtagatccaaaatacgccaagcaaaaggacaagtccgatacgtacaaaagattcaaatatttattaggcgtcacagaccttttccgtcattttattggaattaaggcaaaacatgataaaaatattcaaaaactcttaaaacagttagattctgatgcaaacaaactttccaaatctcacagcaccgtcagttcttcttctcgtcaccatagaaaaacagaaaaggaggaagatgctgaattaatggctgatgaggaagaagagattgtagatacatatcaggaagacatattcgtcagtgaatctccctccttcgtcaagagtggaaaattaagagactatcaagttcaaggcttaaactggttaatatctttgcacgaaaacaaattatctggtatcttggccgatgaaatggggttaggtaaaaccttacaaacaatttctttcttgggttatttgagatacgtcaaacaaatcgagggaccctttttaataatagtaccgaagagtacattagataattggagaagagagtttcttaaatggactccaaacgtcaatgtccttgtgttacatggtgataaagacacaagagctgatatagtaagaaatataatattagaagctagatttgatgtattgattacatcttatgaaatggtcattagagaaaagaatgctttgaaaagattagcttggcaatatattgttattgatgaggctcacaggatcaaaaatgaacaaagcgcgttatctcaaataattagattattttactctaagaatagattattgattacgggcacgcctttacaaaacaatttacacgaattatgggccttgttgaatttcttattacctgatatatttggagattctgaactttttgatgaatggttcgaacaaaacaattctgaacaagatcaagaaattgtaatccaacagttgcactctgtattgaacccctttttattaagaagagtcaaagcggatgtcgaaaaatctttgttacctaaaatcgaaacgaatgtttacgtggggatgacagacatgcaaatacaatggtataaatctttattagagaaggatatagacgctgttaacggtgctgttggaaaaagagaaggcaaaacgaggttattgaatattgttatgcaattaaggaaatgctgtaatcatccatatctttttgaaggcgcagaacctggacctccatacactaccgatgaacatttgattttcaattccgggaaaatgattatattagataagttattgaaaagattaaaggaaaagggatctagagtattgattttcagtcaaatgagtagattattggatatcttagaagattattgctattttagagattttgaatattgcagaatcgacggttctactagccatgaagaacgtatagaagctatcgatgagtataataaacctaattctgaaaagttcgtttttttgttgacaacacgtgccggtggtttaggtattaaccttgtcacagccgacactgttattctttttgattctgattggaaccctcaagctgatttgcaagcaatggatagagcgcatagaattggtcaaaagaaacaagttcatgtttatagatttgtcacagaaaatgctattgaagagaaagtcattgagcgtgccgcacaaaagttgagattagaccagttggttatccaacagggcacgggcaagaaaactgcatctcttggtaactccaaggatgatttattggatatgattcaatttggcgctaaaaatatgtttgaaaagaaagcaagtaaagtcactgttgatgctgatatcgatgatattttgaaaaagggggaacagaagacacaagaattgaatgccaaataccaaagtttaggacttgacgacttacaaaagttcaatgggatcgagaaccaatctgcttacgaatggaatggtaaaagctttcaaaaaaaatccaacgacaaagtagttgaatggattaatccttccagaagagaaagaagaagagagcaaaccacttattctgttgacgattattataaggaaattattggtggtggctctaaatctgcaagcaagcaaactccgcagccaaaagcaccccgcgctccaaaggttatacacggtcaagatttccagttcttccccaaggagttggatgccttacaagaaaaggaacagctttacttcaagaaaaaggtcaactataaggttacttcttatgatattacgggagatatacgtaatgaaggaagcgatgctgaagaagaagaaggagaatacaaaaatgccgctaatacagaaggtcataaaggccatgaggaacttaaaagaaggattgaggaggagcaagagaagattaattctgcaccggattttacccaagaagatgaattaagaaagcaagaattgatatccaaagcctttactaactggaataagagggactttatggcgtttatcaacgcctgcgccaaatacggtagagatgatatggaaaacattaagaaatctattgattccaaaacaccagaagaggttgaagtgtatgcaaaaatattctgggaaagattaaaggaaatcaatgggtgggagaagtatttacataatgtagaacttggtgaaaaaaaaaatgaaaaattgaaattccaggaaactttattgaggcagaaaatcgaacagtgtaaacatccattacatgagttgataatacagtatccacctaataatgctagaagaacttacaataccttagaagataaatttttattattagctgttaacaagtacggacttcgtgctgacaagctctatgaaaaattaaagcaagaaatcatgatgagtgatttgttcacttttgattggtttataaagacaagaacggtgcatgagttatccaaaagagtccatacgttattaactttaattgtaagagagtatgagcaacctgacgcaaataagaagaaaaggagtagaactagtgcgactagagaggatactcctttatcccaaaatgaaagcactagagcttccacggttccaaatctcccgacgacgatggtgacaaatcaaaaagatacaaacgatcatgttgataaaagaaccaaaattgatcaagaagcatga

SEQ ID NO: 10711 - DNA, 231 bp, Saccharomyces cerevisiae
atgagtactgaaaaactggaagcttcggaggaaccacaggctcccttggccaatacatctgagactaactcaataaagggagatacagaaaatattgtaaccgtgtttgacctggcaaatgaaatagaaaaatcactaaaggatgttcagaggcaaatgaaggaaaatgatgatgagttttcacgcagtatacaagcaattgaagacaagcttaacaaaatgagtcggtga

SEQ ID NO: 10712 - DNA, 231 bp, Artificial Sequence
  Description of Artificial Sequence: Synthetic polynucleotide
atgagtactgaaaaattagaagcttctgaggaaccacaggctcccttggccaatacatctgagactaacagcataaagggagatacagaaaatattgtaaccgtgtttgacttggcaaatgaaatagaaaaatctttgaaggatgttcagaggcaaatgaaggaaaatgatgatgagtttagccgcagtatacaagcaattgaagacaagcttaacaaaatgagtcgttga

SEQ ID NO: 10713 - DNA, 729 bp, Saccharomyces cerevisiae
atgataaaaaactatttgggacgaagatggctcaataatcctgcaattcaagcatatgtgaaacaaaatgctgctgtcgcccattctacggtgtttcaaggaaatctttatgaatatacggtgatgagggagttatctgagaaactacgaatgacaaagttgagaaaaaccggtggcgcccatgatggtggcgtagacataaagggaagctggccagtagatgatatttattggaaaatttcatcgttaatgcccaatttggaaatggctagtaacataaaaagaacgaactcgcaaaatggcttcgtattgaaacctttaaagtataggataatcgaccatacttttgaaccattgaaagtactagtccaatgtaaggctttcactaaatcaaaattatctcctagagaattccgtgagttagtaggaacattcacctcactagtatcacatagtcaacgcaacaaaacagtatgcattatgtgttcccctcatatgttaacaaaagataccttaaatcttatcaataacatcacgcttcctctgatatatttacgtgttgagatgctgaaagagaagactgacgggcactttgacttaatcaattcaggaaaactaattaattattacgagaattcatacgcctctacgttaatgcaagattgcaagatttctgaatggctgaagttgaagttgtacaaaaatagtgactttaattcggaaaaataa

SEQ ID NO: 10714 - DNA, 729 bp, Artificial Sequence
  Description of Artificial Sequence: Synthetic polynucleotide
atgataaaaaactatttgggaagaagatggctcaataatcctgcaattcaagcatatgtgaaacaaaatgctgctgtcgcccattctacggtgtttcaaggaaatctttatgaatatacggtgatgagggagttatctgagaaacttcgtatgacaaagttgagaaaaaccggtggcgcccatgatggtggcgtagacataaagggaagctggccagtagatgatatttattggaaaatttcttctttaatgcccaatttggaaatggctagtaacataaaaagaacgaactctcaaaatggcttcgtattgaaacctttaaagtataggataatcgaccatacttttgaaccattgaaagtattagtccaatgtaaggctttcactaaatctaaattatctcctagagaattccgtgagttagtaggaacattcacctctttagtatctcatagtcaacgcaacaaaacagtatgcattatgtgttcccctcatatgttaacaaaagataccttaaatcttatcaataacatcacgcttcctttgatatatttacgtgttgagatgttgaaagagaagactgacgggcactttgacttaatcaattctggaaaattgattaattattacgagaattcttacgcctctacgttaatgcaagattgcaagatttctgaatggttaaagttgaagttgtacaaaaatagtgactttaattctgaaaaatga

SEQ ID NO: 10715 - DNA, 1566 bp, Saccharomyces cerevisiae
atgagctcagacagtttaacgcctaaagacactatagttccagaagaacaaaccaaccaactgcggcaacctgatttagatgaggatagcatacattatgatccagaagctgatgatttagagtcattagagactactgcctcttacgcgtcaacgtcggtgtcggcaaaggtgtataccaagaaggaagtaaataaaggaactgacattgaaagccaaccacattggggtgaaaatacctcgagcacgcacgacagtgacaaagaagaagattccaatgaagaaattgaaagcttcccggagggtggattcaaggcttgggttgtgacatttggttgcttcttgggtctaattgcatgctttggtttattaaactcaacgggggtcatagaaagtcatctacaggacaatcaattatccagtgaaagtgtttctaccattggttggctgttttctttgtttctttttgtttgctctgcctcatgtatcattagtggtacttactttgatagaaatggatttaggacaattatgattgtgggcacggtttttcatgtagccggtctgttcgctaccgccaactctactaaatattggcacttcatactgtcctttgccattgtctgcgggttcggtaatggtattgtactgagtcccctagtaagtgttcccgcccactatttttttaagagacgtggtactgcattggcaatggccactattggtggtagtgtgggtggcgtcgttttcccaattatgttgcgtagtttcttctctatgaagtcagacactgatccaacttatggatttgtttggggcattagaactttaggatttttagatttggctttgctaactctgtcaatcattttagtcaaagagaggttaccacatgttatcgaaaattccaaagatggtgagtcacgttggagatacatactcagagtttatattctgcaatgttttgatgcgaaggctttcctggatatgaaatatcttttttgtgtcctgggaacggtatttagtgagttatccattaattcagctcttacttattatggatcatacgccaccagccatggaatttctgctaatgacgcctacaccttgattatgattataaatgtctgcggcatacccgggagatgggttcctggctatttgagcgataagttcggtaggtttaacgtcgcaattgcaactctactcactctatttatcgtcatgtttgttggttggttaccatttggtaccaatttgacaaatatgtacgttattagtgccctatatggattttgttctggaagcgttttctccttacttcctgtttgctgtggccagatatctaaaacggaagagttcggtaaacgttactctacaatgtacttcgttgtcggtttcggtactttagtcggcattccgataacaggtgccattatctctatcaagacaacggccgattaccaacactatattattttttgcggtttggcaacttttgtaagcgctgtttgctacataatttcgagagcatactgtgttggcttcaagtgggtcagattttaa

SEQ ID NO: 10716 - DNA, 1566 bp, Artificial Sequence
  Description of Artificial Sequence: Synthetic polynucleotide
atgagcagtgacagtttaacgcctaaagacactatagttccagaagaacaaaccaaccaattaagacaacctgatttagatgaggatagcatacattatgatccagaagctgatgatttagagtctttagagactactgcctcttacgcgtctacgtctgtgagcgcaaaggtgtataccaagaaggaagtaaataaaggaactgacattgaaagccaaccacattggggtgaaaataccagtagcacgcacgacagtgacaaagaagaagattccaatgaagaaattgaaagcttcccggagggtggattcaaggcttgggttgtgacatttggttgcttcttgggtttgattgcatgctttggtttattaaactccacgggggtcatagaaagtcatttacaggacaatcaattatccagtgaaagtgtttctaccattggttggttattttctttgtttctttttgtttgctctgcctcttgtatcattagtggtacttactttgatagaaatggatttaggacaattatgattgtgggcacggtttttcatgtagccggtcttttcgctaccgccaactctactaaatattggcacttcatattatcctttgccattgtctgcgggttcggtaatggtattgtattgagtcccttagtaagtgttcccgcccactatttttttaagagacgtggtactgcattggcaatggccactattggtggtagtgtgggtggcgtcgttttcccaattatgttgcgtagtttcttctctatgaagagtgacactgatccaacttatggatttgtttggggcattagaactttaggatttttagatttggctttgttgactttatctatcattttagtcaaagagaggttaccacatgttatcgaaaattccaaagatggtgagtctcgttggagatacatactcagagtttatattttacaatgttttgatgcgaaggctttcttggatatgaaatatcttttttgtgtccttggaacggtatttagtgagttatccattaattctgctcttacttattatggatcttacgccaccagccatggaatttctgctaatgacgcctacaccttgattatgattataaatgtctgcggcatacccgggagatgggttcctggctatttgagcgataagttcggtaggtttaacgtcgcaattgcaactttactcactttatttatcgtcatgtttgttggttggttaccatttggtaccaatttgacaaatatgtacgttattagtgccttatatggattttgttctggaagcgttttctccttacttcctgtttgctgtggccagatatctaaaacggaagagttcggtaaacgttactctacaatgtacttcgttgtcggtttcggtactttagtcggcattccgataacaggtgccattatctctatcaagacaacggccgattaccaacactatattattttttgcggtttggcaacttttgtaagcgctgtttgctacataatttctagagcatactgtgttggcttcaagtgggtcagattttga

SEQ ID NO: 10717 - DNA, 1362 bp, Saccharomyces cerevisiae
atgattcaaacgcaaagtacagcgatcaaacgacgtaattctgttcataaaaacctctttgatccatcactgtatcaaataccagaaccaccacgtggggggttccaacaccaaaaaaaagaatacagtaaggagacattcagtaatcaagtctttggatatgatattactagccttaaaaaaagattcacgcaactatttcctagtaatatacaagggtacttacctgaagttgacctaagaataaccattatttgttctatatggtacgtcacgtcatctatttcaagtaacctatctaaagccattttaagaactttcaaccatcccatagctctcacagaattgcaatttcttgttagtgctgttctatgtgttggatttgcttccatcgtaaatttattccgactacctcgtttgaagcatacgaagttttcaaaggcactcaatagtttccctgacggtatccttcctgaatatctcgatggcaatttcaggagttctatcctgcacaagtttttagttccctcaaagctggttttgatgaccactttccctatgggaatattccaatttattggtcatatcacatcgcacaaggcggtatctatgataccagtatcactagtgcattccgtgaaggcattatccccaataataacagttggctactataaatttttcgaacatcgttattacaattccatgacttattataccttgttacttttaatttttggcgttatgactacttgctggtcaacacatggcagtaagagggcttcagataacaaaagcggatcttcattaatcgggttgctttttgcctttatttccatgataatatttgtagcacagaatatttttgcaaagaatattttaaccatcagaaggaaggtaggaatactgccgtcttcttctacggatgacgtcacgtcgaaggaagggcaaccgagtctagacaaaacaagattttctccattgcaagtggataagattaccatattgttctactgctcctgcattgggttttctttaaccctattaccttttttaaccggcgaattaatgcatggcggtagcgttatcaacgatttaacgctagaaacagtagcccttgtagcgattcatggaatagcccattttttccaagcaatgcttgctttccagttgatcggtttactatcttccattaattattcggtagcaaacatcatgaagaggattgttgttatatccgtggcactcttttgggaaacaaagttaaatttttttcaggtgtttggtgttatcttgacaattgccggattgtacggttatgacaaatgggggctttccaaaaaagatggacgtcaggcataa

SEQ ID NO: 10718 - DNA, 1362 bp, Artificial Sequence
  Description of Artificial Sequence: Synthetic polynucleotide
atgattcaaacgcaaagtacagcgatcaaaagacgtaattctgttcataaaaacctctttgatccatctttgtatcaaataccagaaccaccacgtggggggttccaacaccaaaaaaaagaatacagtaaggagacattcagtaatcaagtctttggatatgatattactagccttaaaaaaagattcacgcaattatttcctagtaatatacaagggtacttacctgaagttgacttgagaataaccattatttgttctatatggtacgtcacgtcttctatttccagtaacttatctaaagccattttaagaactttcaaccatcccatagctctcacagaattgcaatttcttgttagtgctgttttatgtgttggatttgcttccatcgtaaatttattcagattacctcgtttgaagcatacgaagttttccaaggcactcaatagtttccctgacggtatccttcctgaatatctcgatggcaatttcaggagttctatcttgcacaagtttttagttccctccaagttggttttgatgaccactttccctatgggaatattccaatttattggtcatatcacaagtcacaaggcggtatctatgataccagtatctttggtgcattccgtgaaggcattatccccaataataacagttggctactataaatttttcgaacatcgttattacaattccatgacttattataccttgttacttttaatttttggcgttatgactacttgctggtctacacatggcagtaagagggcttctgataacaaaagcggatcttctttaatcgggttgctttttgcctttatttccatgataatatttgtagcacagaatatttttgcaaagaatattttaaccatcagaaggaaggtaggaatattaccgtcttcttctacggatgacgtcacgtccaaggaagggcaaccgagtttggacaaaacaagattttctccattgcaagtggataagattaccatattgttctactgctcctgcattgggttttctttaaccttattaccttttttaaccggcgaattaatgcatggcggtagcgttatcaacgatttaacgttagaaacagtagcccttgtagcgattcatggaatagcccattttttccaagcaatgcttgctttccagttgatcggtttattatcttccattaattattctgtagcaaacatcatgaagaggattgttgttatatccgtggcactcttttgggaaacaaagttaaatttttttcaggtgtttggtgttatcttgacaattgccggattgtacggttatgacaaatgggggctttccaaaaaagatggacgtcaggcatga

SEQ ID NO: 10719 - DNA, 1764 bp, Saccharomyces cerevisiae
atgaacaaaacggaaaacctttctattgaggagacaaatgaaataagggaaaagctgggtatgaaacctattccagtttttcaagaaaagaatacagaccataaagagtctttgtcaatcgaagagacgaatgagttgagggcgtcccttggcctaaaacttatcccaccccaacaaaatttcaattcttctccccctaatgtacataacacatccaaaatcgatgaacttcgagagaagataacaaagtttcaaaaaaaggcgaacgctcctttacgaatggcgcaccttctcgaagaaactaatgtaaatgacgacagttcatggctagaaaacatggatgcaattccttcctcacatgaatccaaacgttccagcacattgccaagaaaaggcgccacgaaggaagacgaaaatattgatctgcataatgttcaagtatcatataatatcgaggcgcttagcccaaagaaagatacgattctaactttgaaagagagcagtatttttgatgatactgattctaccgaagtgttagagaatgtgaaagctgccgaggaaaacgctgatagagagaaactacgattacgacaaatgaataaagatagaagacaaaaaaaaaaaattttaaatgtatctagcttagatattgaagaagaagaagaaggagagaaacactcaattacaactacacatctaatcatcggagcagaacagggtgttatgaaggcaccgaatactatatcagcaaaaccaccaacgggaaaagttaaagtgaatttcgatagcgcaaataatatgtcagatgaagatggtggagactttaaacctttaaaaattaaaaaacgtaagatcaaggacccaagatctactaaagctaggaagtcaaaaattactgataagatggaaattgttaagttagtagatgaagatgaaagtttatcctggatggaagaagaacagccagtcaccataataaatcccagaacaagctcaaacaatgaattgaaagggccagaggacctcgctagagaaattgaaaaggcaagagacgaagagaagcgacgcactgaaagcattttgaaaatgcgtgaaatttccaacagtattgtcgtcgacgaaaaggtaacttttttaaatactttggataccagtctctccgaacgaagtgctactgagaataaagtgaaagtgcatggtgaaggagagaaaaatatcggagatgttaccaatggacatactaaggaagggagtggaaacaatacactgactgaagcagttaataatgaaccaaactacgagggagatgctgaaaatgcaccgaactttttttctggtcttgcatcaacactaggatatcttcggaaaaagagtgttttcaccacaggagacgtcgatttgaaaccaggaaaggatgttaataatagtgaatcacttcgaagggatgtccgaaataaagagcatacgggcactggcacttatacaaaagataagctacacggactggaacaattcacatctagtgactcttccaatgcaaatactcattcaaaaagacaagatcattatgatcctgacataaaactggtttacagagacgaaaagggaaatcgactgactactaaggaggcatataaaaaactgtcacagaaatttcatggtacaaaaagcaacaagaaaaagagagcaaaaatgaaatccagaattgaagcaaggaaaaatacccctgaaaatggtagtttgtttgaatttgatgacaattaa

SEQ ID NO: 10720 - DNA, 1764 bp, Artificial Sequence
  Description of Artificial Sequence: Synthetic polynucleotide
atgaacaaaacggaaaacctttctattgaggagacaaatgaaataagggaaaagttgggtatgaaacctattccagtttttcaagaaaagaatacagaccataaagagtctttgtccatcgaagagacgaatgagttgagggcgtcccttggcttgaaacttatcccaccccaacaaaatttcaattcttctccccctaatgtacataacacatccaaaatcgatgaacttcgtgagaagataacaaagtttcaaaaaaaggcgaacgctcctttaagaatggcgcaccttctcgaagaaactaatgtaaatgacgacagttcttggttagaaaacatggatgcaattccttcctctcatgaatccaaacgttccagcacattgccaagaaaaggcgccacgaaggaagacgaaaatattgatttgcataatgttcaagtatcttataatatcgaggcgcttagcccaaagaaagatacgattttgactttgaaagagagcagtatttttgatgatactgattctaccgaagtgttagagaatgtgaaagctgccgaggaaaacgctgatagagagaaacttcgtttaagacaaatgaataaagatagaagacaaaaaaaaaaaattttaaatgtatctagcttagatattgaagaagaagaagaaggagagaaacactctattacaactacacatttgatcatcggagcagaacagggtgttatgaaggcaccgaatactatatctgcaaaaccaccaacgggaaaagttaaagtgaatttcgatagcgcaaataatatgagtgatgaagatggtggagactttaaacctttaaaaattaaaaaacgtaagatcaaggacccaagatctactaaagctaggaagagtaaaattactgataagatggaaattgttaagttagtagatgaagatgaaagtttatcctggatggaagaagaacagccagtcaccataataaatcccagaacaagcagtaacaatgaattgaaagggccagaggacctcgctagagaaattgaaaaggcaagagacgaagagaagaggcgcactgaaagcattttgaaaatgcgtgaaatttccaacagtattgtcgtcgacgaaaaggtaacttttttaaatactttggataccagtctctccgaaagaagtgctactgagaataaagtgaaagtgcatggtgaaggagagaaaaatatcggagatgttaccaatggacatactaaggaagggagtggaaacaatacattgactgaagcagttaataatgaaccaaactacgagggagatgctgaaaatgcaccgaactttttttctggtcttgcaagcacattaggatatcttagaaaaaagagtgttttcaccacaggagacgtcgatttgaaaccaggaaaggatgttaataatagtgaatctcttagaagggatgtcagaaataaagagcatacgggcactggcacttatacaaaagataagttgcacggattagaacaattcacatctagtgactcttccaatgcaaatactcattctaaaagacaagatcattatgatcctgacataaaattggtttacagagacgaaaagggaaatagattaactactaaggaggcatataaaaaattatctcagaaatttcatggtacaaaaagcaacaagaaaaagagagcaaaaatgaaatccagaattgaagcaaggaaaaatacccctgaaaatggtagtttgtttgaatttgatgacaattga

SEQ ID NO: 10721 - DNA, 1536 bp, Saccharomyces cerevisiae
atggcttacgttttaactgaaacttcagctggttatgctcttttaaaagcttccgataagaaaatctacaaatcttcaagcttaattcaagacttggatagctctgacaaagtcttgaaggaattcaagatcgccgccttttccaagttcaactctgcagctaacgctttagaggaagccaactccattattgaaggtaaagtttcttcccaattagaaaaacttctggaagaaattaaaaaggacaagaagtcgaccttgattgttagtgaaactaaactggcaaacgctattaataagttgggattgaacttcaatgttgtttccgatgctgtaaccttagatatctatagagctatcaaagaatatttgccagaattgctgccaggtatgtctgataatgatctaagcaagatgtctttgggtttagctcattccatcggtcgtcacaaattaaaattttctgctgacaaagttgatgttatgattattcaagcaattgctttattggatgatttagataaagaattaaacacatatgccatgagatgtaaagaatggtacgggtggcactttcctgagttagctaagattgttactgattccgtcgcttatgcgagaattattctaacaatgggtatcagatccaaggcttctgaaacagatttgagtgaaatcttaccagaagagattgaagaacgtgtcaaaaccgctgctgaagtgtctatgggtactgaaatcactcaaaccgatctagacaacattaatgctttagctgaacaaatagtcgaatttgccgcttacagagaacagttgtccaattacttgtctgcaagaatgaaggctattgctccaaacttgactcagttggttggtgaattagttggtgctagacttatcgctcattcaggttccttaatttccttggccaaatcaccagcttctaccatccaaatattaggtgccgaaaaggctttattcagagctttaaagaccaagcatgatacaccaaagtatggtttgctatatcatgcctctcttgttggtcaagctactggtaagaacaaaggtaagattgcaagagttctggctgctaaggccgctgtctcattgcgttatgatgctttagctgaagatagagacgattcaggtgacattggtctagaatcaagagccaaagtagaaaatagattatcccaattagaaggtagagatttaagaactactccaaaggttgttcgtgaggctaagaaggtggaaatgactgaagctagggcctacaatgcagatgctgataccgcaaaggctgcttctgattctgaatccgattctgatgatgaagaggaagaaaagaaagaaaagaaagaaaagaagagaaagagagacgatgatgaagattccaaggattctaaaaaagctaagaaggaaaagaaggacaagaaggaaaagaaggaaaagaaggaaaagaaggagaagaaagagaagaaagagaagaaggaaaagaagtccaagaaagagaagaaagagaagaaataa

SEQ ID NO: 10722 - DNA, 1536 bp, Artificial Sequence
  Description of Artificial Sequence: Synthetic polynucleotide
atggcttacgttttaactgaaactagtgctggttatgctcttttaaaagcttccgataagaaaatctacaaatcttctagcttaattcaagacttggatagctctgacaaagtcttgaaggaattcaagatcgccgccttttccaagttcaactctgcagctaacgctttagaggaagccaactccattattgaaggtaaagtttcttcccaattagaaaaacttttagaagaaattaaaaaggacaagaagtctaccttgattgttagtgaaactaaattggcaaacgctattaataagttgggattgaacttcaatgttgtttccgatgctgtaaccttagatatctatagagctatcaaagaatatttgccagaattgttaccaggtatgtctgataatgatttgagcaagatgtctttgggtttagctcattccatcggtcgtcacaaattaaaattttctgctgacaaagttgatgttatgattattcaagcaattgctttattggatgatttagataaagaattaaacacatatgccatgagatgtaaagaatggtacgggtggcactttcctgagttagctaagattgttactgattccgtcgcttatgcgagaattattttaacaatgggtatcagatccaaggcttctgaaacagatttgagtgaaatcttaccagaagagattgaagaacgtgtcaaaaccgctgctgaagtgtctatgggtactgaaatcactcaaaccgatttggacaacattaatgctttagctgaacaaatagtcgaatttgccgcttacagagaacagttgtccaattacttgtctgcaagaatgaaggctattgctccaaacttgactcagttggttggtgaattagttggtgctagacttatcgctcattctggttccttaatttccttggccaaatctccagcttctaccatccaaatattaggtgccgaaaaggctttattcagagctttaaagaccaagcatgatacaccaaagtatggtttgttatatcatgcctctcttgttggtcaagctactggtaagaacaaaggtaagattgcaagagttttggctgctaaggccgctgtctctttgcgttatgatgctttagctgaagatagagacgattctggtgacattggtttggaatctagagccaaagtagaaaatagattatcccaattagaaggtagagatttaagaactactccaaaggttgttcgtgaggctaagaaggtggaaatgactgaagctagggcctacaatgcagatgctgataccgcaaaggctgcttctgattctgaatccgattctgatgatgaagaggaagaaaagaaagaaaagaaagaaaagaagagaaagagagacgatgatgaagattccaaggattctaaaaaagctaagaaggaaaagaaggacaagaaggaaaagaaggaaaagaaggaaaagaaggagaagaaagagaagaaagagaagaaggaaaagaagtccaagaaagagaagaaagagaagaaatga

SEQ ID NO: 10723 - DNA, 873 bp, Saccharomyces cerevisiae
atggggaccgaagatgccattgcccttccaaatagcacgctagagccgcgtaccgaagctaagcaaagactatcatctaagagtcatcaagtctcggcgaaagtaacgattccagcaaaagaagaaattagtagtagcgatgacgatgcacacgttccagtgacagaaatacatttgaaatctcatgaatggttcggcgattttataactaaacatgaaattccccgtaaggtgttccattcttccattggctttattactttgtacctgtatacgcagggtattaattataaaaatgttttatggcctttgatatacgccttcatcatattgtttattttggatctgataagactaaactggccctttttcaatatgctttactgtagaactgtgggtgcgctaatgagaaaaaaggagattcatacatacaatggggtattgtggtacattcttgggttaatcttttcttttaactttttctctaaagatgttaccttaatatcgttatttttgctaagttggtccgatacagccgccgcaactattggaagaaagtatggtcatttaacacccaaagtggcaagaaataaatcccttgcaggttcgatagctgcgtttacagttggtgttatcacctgctgggtattttatggctattttgttcctgcctacagctacgtcaacaaacctggcgagatccaatggagcccagaaacaagcagattaagtttgaatatgctatccttgttaggtggtgtggtagctgctttgagtgaaggtatagatttgttcaactgggatgataatttcactattcctgtcctgtcatcactttttatgaacgcagtaatcaaaacattcaagaaataa

SEQ ID NO: 10724 - DNA, 873 bp, Artificial Sequence
  Description of Artificial Sequence: Synthetic polynucleotide
atggggaccgaagatgccattgcccttccaaatagcacgttggagccgcgtaccgaagctaagcaaagattatcttctaagagtcatcaagtctctgcgaaagtaacgattccagcaaaagaagaaattagtagtagcgatgacgatgcacacgttccagtgacagaaatacatttgaaatctcatgaatggttcggcgattttataactaaacatgaaattccccgtaaggtgttccattcttccattggctttattactttgtacttatatacgcagggtattaattataaaaatgttttatggcctttgatatacgccttcatcatattgtttattttggatttgataagattgaactggccctttttcaatatgctttactgtagaactgtgggtgcgttaatgagaaaaaaggagattcatacatacaatggggtattgtggtacattcttgggttaatcttttcttttaactttttctctaaagatgttaccttaatatctttatttttgttaagttggtccgatacagccgccgcaactattggaagaaagtatggtcatttaacacccaaagtggcaagaaataaatcccttgcaggttccatagctgcgtttacagttggtgttatcacctgctgggtattttatggctattttgttcctgcctacagctacgtcaacaaacctggcgagatccaatggagcccagaaacaagcagattaagtttgaatatgctttccttgttaggtggtgtggtagctgctttgagtgaaggtatagatttgttcaactgggatgataatttcactattcctgtcctttcttctctttttatgaacgcagtaatcaaaacattcaagaaatga

SEQ ID NO: 10725 - DNA, 519 bp, Saccharomyces cerevisiae
atggctcatttcaaagaataccaagtcattggtcgtcgtttaccaactgaatccgttccagaaccaaagttgttcagaatgagaatttttgcttcaaatgaagtcatcgccaagtctcgttactggtatttcttgcaaaaattgcacaaggttaagaaggcttctggtgaaattgtttccatcaaccaaatcaacgaagctcacccaaccaaggtcaagaacttcggtgtttgggttagatacgattccagatctggtactcacaacatgtacaaggaaatcagagacgtatccagagttgctgccgtcgaaaccttataccaagacatggctgctagacacagagctagatttagatctattcacatcttgaaggttgctgaaattgaaaagactgctgatgtcaagagacaatacgtcaagcaattcttgaccaaggatttaaaattcccattacctcacagagtccaaaaatctaccaagactttctcttacaagagaccatcaaccttctactaa

SEQ ID NO: 10726 - DNA, 519 bp, Artificial Sequence
  Description of Artificial Sequence: Synthetic polynucleotide
atggctcatttcaaagaataccaagtcattggtcgtcgtttaccaactgaatccgttccagaaccaaagttgttcagaatgagaatttttgcttctaatgaagtcatcgccaagtctcgttactggtatttcttgcaaaaattgcacaaggttaagaaggcttctggtgaaattgtttccatcaaccaaatcaacgaagctcacccaaccaaggtcaagaacttcggtgtttgggttagatacgattccagatctggtactcacaacatgtacaaggaaatcagagacgtatccagagttgctgccgtcgaaaccttataccaagacatggctgctagacacagagctagatttagatctattcacatcttgaaggttgctgaaattgaaaagactgctgatgtcaagagacaatacgtcaagcaattcttgaccaaggatttaaaattcccattacctcacagagtccaaaaatctaccaagactttctcttacaagagaccatctaccttctactga

SEQ ID NO: 10727 - DNA, 1017 bp, Saccharomyces cerevisiae
atgccatcaaatttgaatatagtgaaggttacaaaaccacaagaagaaaataagaattttttacacaaaaacacgaatgaacccaatgaaatggaacaatcgcagacacaagaagcagttacagaaaattttaccgaaaacagtaatctcagtgcaaatgaacatgcagctaggaggggtagattaaatttgaaaacagttgatcacatagaaacttatccaatagtgcaagaaacagaagagattgcaaagaagattgctctaacgagaattattttagcacaaacaaagcctagaatcgataaagtggtagtgtcacgtcccgttcaagccgtagcaccagtggtcaatttttttgacaagatggccaattcgactttaagtacagtagagcgcgttgtcccttctttgaaaacaaaaacttataaaagattaggtgaggaaattgcacttccgtatactttgtcgaaaaagtatggaaagcagctcagggatacgacagcaagaaatggagacaactatgtttaccaacctgtccatggaaggttgatgaaatttaggaagtactataatgaaaaattcatagacacaaagggcaagcctttgataagggggcaacttgaccctgttttgttaccagtcaataatacattcgaaaaggtaacggtaaagtatttgcccaaaggtaagaaagttccaaatgattccttttcttgtgagtttaatagggggctagctttagaatacaattttatgacaagagcagtttctgcagttagtcatcaagttgttggtattgcaaagcttcccattgcctatggatatcatacaaactctgtttataataaaaacttagacaaacaggccgatttaaaaatgaaaaatgtattgagaggtacttgggataccataactgatttagaacgcgaaatttgggcctctgtcaccgatagaagtttgtttagattttttggcaacaaatctgagggaggagatttaccacatctagtacaataa

SEQ ID NO: 10728 - DNA, 1017 bp, Artificial Sequence
  Description of Artificial Sequence: Synthetic polynucleotide
atgccatccaatttgaatatagtgaaggttacaaaaccacaagaagaaaataagaattttttacacaaaaacacgaatgaacccaatgaaatggaacaatctcagacacaagaagcagttacagaaaattttaccgaaaacagtaatctcagtgcaaatgaacatgcagctaggaggggtagattaaatttgaaaacagttgatcacatagaaacttatccaatagtgcaagaaacagaagagattgcaaagaagattgctttgacgagaattattttagcacaaacaaagcctagaatcgataaagtggtagtgtctcgtcccgttcaagccgtagcaccagtggtcaatttttttgacaagatggccaattctactttaagtacagtagagcgcgttgtcccttctttgaaaacaaaaacttataaaagattaggtgaggaaattgcacttccgtatactttgagtaaaaagtatggaaagcagctcagggatacgacagcaagaaatggagacaactatgtttaccaacctgtccatggaaggttgatgaaatttaggaagtactataatgaaaaattcatagacacaaagggcaagcctttgataagggggcaacttgaccctgttttgttaccagtcaataatacattcgaaaaggtaacggtaaagtatttgcccaaaggtaagaaagttccaaatgattccttttcttgtgagtttaatagggggttggctttagaatacaattttatgacaagagcagtttctgcagttagtcatcaagttgttggtattgcaaagcttcccattgcctatggatatcatacaaactctgtttataataaaaacttagacaaacaggccgatttaaaaatgaaaaatgtattgagaggtacttgggataccataactgatttagaacgcgaaatttgggcctctgtcaccgatagaagtttgtttagattttttggcaacaaatctgagggaggagatttaccacatttggtacaatga

SEQ ID NO: 10729 - DNA, 330 bp, Saccharomyces cerevisiae
atgacaatgatacgtttttgtggcgcgcgtcaatcggcgataatcagcaacgcgtctgacgctgctgcaggaaccaacaaaaaaaggatactaaaccctcttgagtccttgtgtcttaacgaccgcatagacgaacaccgttgcaaagaagtccagttatcttcattacgaagtctattgtatgctatgattttaaatagaaccataggcagcgagaccggcgttttttcttttctgctcttttcttttcgttacttcggagaggaaagagacttattttactgcttcttctccgtctttttacttaacattacatatttattggattag

SEQ ID NO: 10730 - DNA, 330 bp, Artificial Sequence
  Description of Artificial Sequence: Synthetic polynucleotide
atgacaatgatacgtttttgtggcgcgcgtcaaagtgcgataatcagcaacgcgtctgacgctgctgcaggaaccaacaaaaaaaggatattaaaccctcttgagtccttgtgtcttaacgaccgcatagacgaacaccgttgcaaagaagtccagttatcttctttaagaagtttattgtatgctatgattttaaatagaaccataggcagcgagaccggcgttttttcttttttactcttttcttttcgttacttcggagaggaaagagacttattttactgcttcttctccgtctttttacttaacattacatatttattggattga

SEQ ID NO: 10731 - DNA, 1041 bp, Saccharomyces cerevisiae
atggatgaaatgcattcttcagacacacttttgttgcgaacaccgaaatcaaaaaaaaaaattgggcttgtaatacccagtacaccaagtaaaaaatgtaaatattcatcaggctttatagcagaagacactacgccctccaaacggtttcgtttataccaagccaaatttaagacaagttcaaagaatgtcaaagcccaaactcttagcgtatcaataaaaaaaaatcaaggtgaaatcaccaatccatttatgaccgaaggatataatgattaccggaatattgtcagtcctggattgagttttgataacgactgcttttcagaacatgaattagttagtccattgagtgatatatcttcgataaactcgacatcgcctgatgttgaaaagattgattctttagatccttttggcgttgattcttttgtctggaactgtaagccgcttgttaataaagaagcactggagctccaccgaatgattcattcttcgtttccgatgagcccactggaatccaacagtgatgtgccacttttattgcctaaactcaaaaaaaggttatctccagtaaacagatcgaccttcaagccaacaaggtacgaaccctctcaccgtctattgaagcccaaaaaatcaattctaacagtaccagccaaatctctgaatctcatagtcagttcgtcgcgaggctcattaaatgacgctaccatctttgccaccgaaataaattctactttgagcaatgaagaaaacaaattaccagcaatttctagtatttgggagaagctcacaattccagtaaactcttcaattaaggagaaatacaagaagcttaaagaccaaatatatgggcaagctagtaattttggcgaagatgaagataatgaagaagacaatgaagacgaccttcccgacgcggcagtaataagaggttacgaatttcagtcaggaaggcgcgatgagctgacgcaatgtaatgaactacagagtacgaaggactacaaaaaagttcagtgggcaaaggttttagaacaataa

SEQ ID NO: 10732 - DNA, 1041 bp, Artificial Sequence
  Description of Artificial Sequence: Synthetic polynucleotide
atggatgaaatgcattcttctgacacacttttgttgagaacaccgaaatctaaaaaaaaaattgggcttgtaatacccagtacaccaagtaaaaaatgtaaatattcttctggctttatagcagaagacactacgccctccaaaagatttcgtttataccaagccaaatttaagacaagttccaagaatgtcaaagcccaaactcttagcgtatctataaaaaaaaatcaaggtgaaatcaccaatccatttatgaccgaaggatataatgattacagaaatattgtcagtcctggattgagttttgataacgactgcttttctgaacatgaattagttagtccattgagtgatatatcttctataaactccacatctcctgatgttgaaaagattgattctttagatccttttggcgttgattcttttgtctggaactgtaagccgcttgttaataaagaagcattagagctccacagaatgattcattcttcttttccgatgagcccattggaatccaacagtgatgtgccacttttattgcctaaactcaaaaaaaggttatctccagtaaacagatctaccttcaagccaacaaggtacgaaccctctcaccgtttattgaagcccaaaaaatccattttaacagtaccagccaaatctttgaatctcatagtcagttcttctcgtggctctttaaatgacgctaccatctttgccaccgaaataaattctactttgagcaatgaagaaaacaaattaccagcaatttctagtatttgggagaagctcacaattccagtaaactcttccattaaggagaaatacaagaagcttaaagaccaaatatatgggcaagctagtaattttggcgaagatgaagataatgaagaagacaatgaagacgaccttcccgacgcggcagtaataagaggttacgaatttcagtccggaaggcgcgatgagcttacgcaatgtaatgaattacagagtacgaaggactacaaaaaagttcagtgggcaaaggttttagaacaatga

SEQ ID NO: 10733 - DNA, 1320 bp, Saccharomyces cerevisiae
atgaaactcggaagcaaacaggtaaaaattatatccttgttgctgctagacacagtgttcttcgggatcgagataactaccgggtacttgtctcactctttggctctaatcgcggactcattccatatgctaaacgatataatttctcttgtggttgcactttgggccgtaaatgttgccaaaaacagaaatccggattcaacgtacacttatggttggaaaagggcggagattttgggtgctctgattaacgccgtctttttgattgccttatgtgtctcaattttgatagaagcgctacaaagaattattgctccccccgtgattgaaaatcctaagtttgtgttgtatgtgggtgtcgcagggttgatatcgaacaccgttggacttttcttatttcacgacaatgatcaagagcatggacatggacacggacattcccatggcggtatctttgccgaccatgagatgcatatgccatcatcccacacacatacacatgcccatgttgatggaatagagaatactacaccaatggatagtacggataacattagtgagattatgcctaatgctatagtagatagttttatgaacgaaaatactagattattgacaccggaaaatgcatccaagacgccatcatactcaacgtcaagccatacgattgccagcggcggaaattacacagaacacaacaagcgcaagagatctttaaatatgcatggtgtgtttcttcacgttttgggcgatgctcttggcaacatcggcgttatgttgtctgcatttttcatttggaagaccgactattcttggaagtattatacagatccgcttgtctcattgataattaccggtataattttttcctctgcgcttcctctatcgtgcaaggcttccaaaatattgttacaagcgacaccttccactttatccggcgatcaagtagaaggtgatcttttgaaaataccaggaataatagctattcatgatttccatatttggaatttaacagagtctatttttattgcatctttgcatattcaactagatatcagcccggaacaatttactgacctggccaaaatagttagatcaaaacttcaccgctatggcattcactccgctactttgcaacctgaatttattaccagagaggttacttcaaccgaaagagccggagactcccaaggtgatcatctacaaaatgacccgctttcattaaggccaaagacatatggtactggcatttcaggttccacttgtcttatcgacgacgctgccaactgcaacacagctgattgcttagaggatcattaa

SEQ ID NO: 10734 - DNA, 1320 bp, Artificial Sequence
  Description of Artificial Sequence: Synthetic polynucleotide
atgaaactcggaagcaaacaggtaaaaattatatccttgttgttattagacacagtgttcttcgggatcgagataactaccgggtacttgtctcactctttggctttgatcgcggactctttccatatgttgaacgatataatttctcttgtggttgcactttgggccgtaaatgttgccaaaaacagaaatccggattctacgtacacttatggttggaaaagggcggagattttgggtgctttgattaacgccgtctttttgattgccttatgtgtctctattttgatagaagcgttgcaaagaattattgctccccccgtgattgaaaatcctaagtttgtgttgtatgtgggtgtcgcagggttgataagcaacaccgttggacttttcttatttcacgacaatgatcaagagcatggacatggacacggacattcccatggcggtatctttgccgaccatgagatgcatatgccatcttcccacacacatacacatgcccatgttgatggaatagagaatactacaccaatggatagtacggataacattagtgagattatgcctaatgctatagtagatagttttatgaacgaaaatactagattattgacaccggaaaatgcatccaagacgccatcttactctacgtctagccatacgattgccagcggcggaaattacacagaacacaacaagcgcaagagatctttaaatatgcatggtgtgtttcttcacgttttgggcgatgctcttggcaacatcggcgttatgttgtctgcatttttcatttggaagaccgactattcttggaagtattatacagatccgcttgtctctttgataattaccggtataattttttcctctgcgcttcctttaagttgcaaggcttccaaaatattgttacaagcgacaccttccactttatccggcgatcaagtagaaggtgatcttttgaaaataccaggaataatagctattcatgatttccatatttggaatttaacagagtctatttttattgcatctttgcatattcaattggatatcagcccggaacaatttactgacttggccaaaatagttagaagtaaacttcaccgctatggcattcactccgctactttgcaacctgaatttattaccagagaggttacttctaccgaaagagccggagactcccaaggtgatcatttacaaaatgacccgctttctttaaggccaaagacatatggtactggcatttctggttccacttgtcttatcgacgacgctgccaactgcaacacagctgattgcttagaggatcattga

SEQ ID NO: 10735 - DNA, 210 bp, Saccharomyces cerevisiae
atgctggttcccatgcataactcacccacggccgccaacggccgcttatcacttactgtcgccagctccggtcttagaaagggtaaaaaaaaccgggtgtatactatacactcatacatccgctcacccgtttccagtagtgaattttcattttctgtacgaaggcaatataagctgacgatccgcataaagcagaagactcatttgtaa

SEQ ID NO: 10736 - DNA, 210 bp, Artificial Sequence
  Description of Artificial Sequence: Synthetic polynucleotide
atgcttgttcccatgcataactctcccacggccgccaacggccgcttatctcttactgtcgccagctccggtcttagaaagggtaaaaaaaacagagtgtatactatacactcttacatccgctctcccgtttccagtagtgaattttctttttctgtaagaaggcaatataagttgacgatccgcataaagcagaagactcatttgtga

SEQ ID NO: 10737 - DNA, 2103 bp, Saccharomyces cerevisiae
atggttgctcaatataccgttccagttgggaaagccgccaatgagcatgaaactgctccaagaagaaattatcaatgccgcgagaagccgctcgtcagaccgcctaacacaaagtgttccactgtttatgagtttgttctagagtgctttcagaagaacaaaaattcaaatgctatgggttggagggatgttaaggaaattcatgaagaatccaaatcggttatgaaaaaagttgatggcaaggagacttcagtggaaaagaaatggatgtattatgaactatcgcattatcattataattcatttgaccaattgaccgatatcatgcatgaaattggtcgtgggttggtgaaaataggattaaagcctaatgatgatgacaaattacatctttacgcagccacttctcacaagtggatgaagatgttcttaggagcgcagtctcaaggtattcctgtcgtcactgcctacgatactttgggagagaaagggctaattcattctttggtgcaaacggggtctaaggccatttttaccgataactctttattaccatccttgatcaaaccagtgcaagccgctcaagacgtaaaatacataattcatttcgattccatcagttctgaggacaggaggcaaagtggtaagatctatcaatctgctcatgatgccatcaacagaattaaagaagttagacctgatatcaagacctttagctttgacgacatcttgaagctaggtaaagaatcctgtaacgaaatcgatgttcatccacctggcaaggatgatctttgttgcatcatgtatacgtctggttctacaggtgagccaaagggtgttgtcttgaaacattcaaatgttgtcgcaggtgttggtggtgcaagtttgaatgttttgaagtttgtgggcaataccgaccgtgttatctgttttttgccactagctcatatttttgaattggttttcgaactattgtccttttattggggggcctgcattggttatgccaccgtaaaaactttaactagcagctctgtgagaaattgtcaaggtgatttgcaagaattcaagcccacaatcatggttggtgtcgccgctgtttgggaaacagtgagaaaagggatcttaaaccaaattgataatttgcccttcctcaccaagaaaatcttctggaccgcgtataataccaagttgaacatgcaacgtctccacatccctggtggcggcgccttaggaaacttggttttcaaaaaaatcagaactgccacaggtggccaattaagatatttgttaaacggtggttctccaatcagtcgggatgctcaggaattcatcacaaatttaatctgccctatgcttattggttacggtttaaccgagacatgcgctagtaccaccatcttggatcctgctaattttgaactcggcgtcgctggtgacctaacaggttgtgttaccgtcaaactagttgatgttgaagaattaggttattttgctaaaaacaaccaaggtgaagtttggatcacaggtgccaatgtcacgcctgaatattataagaatgaggaagaaacttctcaagctttaacaagcgatggttggttcaagaccggtgacatcggtgaatgggaagcaaatggccatttgaaaataattgacaggaagaaaaacttggtcaaaacaatgaacggtgaatatatcgcactcgagaaattagagtccgtttacagatctaacgaatatgttgctaacatttgtgtttatgccgaccaatctaagactaagccagttggtattattgtaccaaatcatgctccattaacgaagcttgctaaaaagttgggaattatggaacaaaaagacagttcaattaatatcgaaaattatttggaggatgcaaaattgattaaagctgtttattctgatcttttgaagacaggtaaagaccaaggtttggttggcattgaattactagcaggcatagtgttctttgacggcgaatggactccacaaaacggttttgttacgtccgctcagaaattgaaaagaaaagacattttgaatgctgtcaaagataaagttgacgccgtttatagttcgtcttaa

SEQ ID NO: 10738 - DNA, 2103 bp, Artificial Sequence
  Description of Artificial Sequence: Synthetic polynucleotide
atggttgctcaatataccgttccagttgggaaagccgccaatgagcatgaaactgctccaagaagaaattatcaatgccgcgagaagccgctcgtcagaccgcctaacacaaagtgttccactgtttatgagtttgttttggagtgctttcagaagaacaaaaatagtaatgctatgggttggagggatgttaaggaaattcatgaagaatccaaatctgttatgaaaaaagttgatggcaaggagacttctgtggaaaagaaatggatgtattatgaattatctcattatcattataattcttttgaccaattgaccgatatcatgcatgaaattggtcgtgggttggtgaaaataggattaaagcctaatgatgatgacaaattacatctttacgcagccacttctcacaagtggatgaagatgttcttaggagcgcagtctcaaggtattcctgtcgtcactgcctacgatactttgggagagaaagggttgattcattctttggtgcaaacggggtctaaggccatttttaccgataactctttattaccatccttgatcaaaccagtgcaagccgctcaagacgtaaaatacataattcatttcgattccatcagttctgaggacaggaggcaaagtggtaagatctatcaatctgctcatgatgccatcaacagaattaaagaagttagacctgatatcaagacctttagctttgacgacatcttgaagttgggtaaagaatcctgtaacgaaatcgatgttcatccacctggcaaggatgatctttgttgcatcatgtatacgtctggttctacaggtgagccaaagggtgttgtcttgaaacattctaatgttgtcgcaggtgttggtggtgcaagtttgaatgttttgaagtttgtgggcaataccgaccgtgttatctgttttttgccattggctcatatttttgaattggttttcgaattattgtccttttattggggggcctgcattggttatgccaccgtaaaaactttaactagcagctctgtgagaaattgtcaaggtgatttgcaagaattcaagcccacaatcatggttggtgtcgccgctgtttgggaaacagtgagaaaagggatcttaaaccaaattgataatttgcccttcctcaccaagaaaatcttctggaccgcgtataataccaagttgaacatgcaacgtctccacatccctggtggcggcgccttaggaaacttggttttcaaaaaaatcagaactgccacaggtggccaattaagatatttgttaaacggtggttctccaatcagtagagatgctcaggaattcatcacaaatttaatctgccctatgcttattggttacggtttaaccgagacatgcgctagtaccaccatcttggatcctgctaattttgaactcggcgtcgctggtgacttgacaggttgtgttaccgtcaaattggttgatgttgaagaattaggttattttgctaaaaacaaccaaggtgaagtttggatcacaggtgccaatgtcacgcctgaatattataagaatgaggaagaaacttctcaagctttaacaagcgatggttggttcaagaccggtgacatcggtgaatgggaagcaaatggccatttgaaaataattgacaggaagaaaaacttggtcaaaacaatgaacggtgaatatatcgcactcgagaaattagagtccgtttacagatctaacgaatatgttgctaacatttgtgtttatgccgaccaatctaagactaagccagttggtattattgtaccaaatcatgctccattaacgaagcttgctaaaaagttgggaattatggaacaaaaagacagttctattaatatcgaaaattatttggaggatgcaaaattgattaaagctgtttattctgatcttttgaagacaggtaaagaccaaggtttggttggcattgaattattggcaggcatagtgttctttgacggcgaatggactccacaaaacggttttgttacgtccgctcagaaattgaaaagaaaagacattttgaatgctgtcaaagataaagttgacgccgtttatagttcttcttga

SEQ ID NO: 10739 - DNA, 642 bp, Saccharomyces cerevisiae
atgaactacagcgcagactctggtaatacagtttatgtggggaatatagatccaaggataacgaaagaacaactttatgaactcttcattcagatcaaccctgttttaaggattaagtatccgaaagataaagttctacaagcttaccaaggctacgcattcatcgaattttataatcaaggagatgctcaatatgcaataaaaataatgaataataccgttagattatacgaccgactgataaaggttcgtcaagtaaccaattctacaggaacaactaatttaccttcaaatatttctaaggacatgattctacctattgctaagttgttcataaaaaaccttgcagattcgatagatagcgaccaattagtgaaaattttcaataaatttggtaagctcataagggaacccgaaattttctacctatcaaacggaaaattaaagtgtgcttatgtttattttgaggactttgaaaaagcagatttggcaataaaatctttgaacaatcagttagtcgccaacaacagaattactgttgattatgccttcaaagaaaatggaaaaggtaacgcaaaatacggtgatgacgttgacaggctgttgaataaagaagcattaaagcacaacatgttgaaataa

SEQ ID NO: 10740 - DNA, 642 bp, Artificial Sequence
  Description of Artificial Sequence: Synthetic polynucleotide
atgaactacagcgcagactctggtaatacagtttatgtggggaatatagatccaaggataacgaaagaacaactttatgaactcttcattcagatcaaccctgttttaaggattaagtatccgaaagataaagttttgcaagcttaccaaggctacgcattcatcgaattttataatcaaggagatgctcaatatgcaataaaaataatgaataataccgttagattatacgacagattaataaaggttcgtcaagtaaccaattctacaggaacaactaatttaccttccaatatttctaaggacatgattttacctattgctaagttgttcataaaaaaccttgcagattctatagatagcgaccaattagtgaaaattttcaataaatttggtaagctcataagggaacccgaaattttctacctttccaacggaaaattaaagtgtgcttatgtttattttgaggactttgaaaaagcagatttggcaataaaatctttgaacaatcagttagtcgccaacaacagaattactgttgattatgccttcaaagaaaatggaaaaggtaacgcaaaatacggtgatgacgttgacaggttattgaataaagaagcattaaagcacaacatgttgaaatga

SEQ ID NO: 10741 - DNA, 1476 bp, Saccharomyces cerevisiae
atgaggttgatatccaaaagaagaatcagatttattgtgtttattttgttcggcgtcctcactgtattcgtagtatcaagacttgttgttcattttcagtataaccaagaaataaagttctataaaaagtattttcaacagaggaaggatgggcttcacgaaatttacaacccattagaaatcaagcaaatacccaaggaaacgatagatgacttatataccgcccgtttagataaagagttgaaaaacggtgaggtcatcgagtggtccaagtttgcatacgtgaattatgtgactaatgctgattatctttgtaatacgctgatcatattcaatgatctgaaacaggagtttgagacaaaggccaagttagttcttctgatatctaaagatctgctagacccaaacacttcctcaaatgtggcttacattagttcactccttaacaagattcaagctatagatgaggaccaggtagttatcaagttgatagataacattgtgaagccaaaggatactacaccttggaatgaaagtttaacaaaattactagtatttaaccaaacagaatttgaccgtgtgatttatcttgacaacgacgcaattttaagatcaagcttggacgaattatttttcctaccaaattatatcaaatttgcagctccattaacatactggtttttatctaacagtgatttggaaaaatcataccatgaaacgcgacaccgtgaaaagcaaccaatcaacctccagtcgtatacaaaagtgctgactaaaagaattgggaaaggtcagatgatttataatcatttgccgagtttgccgcattcattgtacttgaattctaataacatagctcaggacattataagttctacatcatctttatcgccgttatttgatttccaaagtagtaaaaaggttggaaaattaaaatttgcttctaatttaatggttattaatccttcaaaggaggcgtttgatgaaattgtgaacgttatgctgcccaagattttaaacaagaaggaaaagtacgatatggatttgatcaatgaagaaatgtacaatttaaagaagattatttataaacagtttattttcttcagaaaagtccgaaaacttttcaaaccagaagtattggttttgccatttgcaaggtacggcttactgacgggttcattgagaaacccacggcactattctataatctataatgacgttttgggttataagacattggataatgatggcaacgatattccggtaggattaaacgacagtgtcgcatattctaagtacatacatttttcggattatccattggccaagccctggaattatccatcaatgaaggagtttgaatgtatcgttaaagaagaagacgcggaggattcaaagctagagcaccaagcttgtgacctttggaactcggtgtacgcttcttacatacagtccagggaaatctgcctcgtttga

SEQ ID NO: 10742 - DNA, 1476 bp, Artificial Sequence
  Description of Artificial Sequence: Synthetic polynucleotide
atgaggttgatatccaaaagaagaatcagatttattgtgtttattttgttcggcgtcctcactgtattcgtagtatctagacttgttgttcattttcagtataaccaagaaataaagttctataaaaagtattttcaacagaggaaggatgggcttcacgaaatttacaacccattagaaatcaagcaaatacccaaggaaacgatagatgacttatataccgcccgtttagataaagagttgaaaaacggtgaggtcatcgagtggtccaagtttgcatacgtgaattatgtgactaatgctgattatctttgtaatacgttgatcatattcaatgatttgaaacaggagtttgagacaaaggccaagttagttcttttgatatctaaagatttattagacccaaacacttcctctaatgtggcttacattagtagcctccttaacaagattcaagctatagatgaggaccaggtagttatcaagttgatagataacattgtgaagccaaaggatactacaccttggaatgaaagtttaacaaaattattggtatttaaccaaacagaatttgaccgtgtgatttatcttgacaacgacgcaattttaagaagcagcttggacgaattatttttcttaccaaattatatcaaatttgcagctccattaacatactggtttttatctaacagtgatttggaaaaatcttaccatgaaacgagacaccgtgaaaagcaaccaatcaacctccagagttatacaaaagtgttgactaaaagaattgggaaaggtcagatgatttataatcatttgccgagtttgccgcattctttgtacttgaattctaataacatagctcaggacattataagttctacatcttctttatctccgttatttgatttccaaagtagtaaaaaggttggaaaattaaaatttgcttctaatttaatggttattaatccttctaaggaggcgtttgatgaaattgtgaacgttatgttgcccaagattttaaacaagaaggaaaagtacgatatggatttgatcaatgaagaaatgtacaatttaaagaagattatttataaacagtttattttcttcagaaaagtcagaaaacttttcaaaccagaagtattggttttgccatttgcaaggtacggcttattgacgggttctttgagaaacccaagacactattctataatctataatgacgttttgggttataagacattggataatgatggcaacgatattccggtaggattaaacgacagtgtcgcatattctaagtacatacatttttctgattatccattggccaagccctggaattatccaagcatgaaggagtttgaatgtatcgttaaagaagaagacgcggaggattctaagttggagcaccaagcttgtgacctttggaactctgtgtacgcttcttacatacagtccagggaaatctgcctcgtttga

SEQ ID NO: 10743 - DNA, 2262 bp, Saccharomyces cerevisiae
atgccgtacagagtggcgacgggctacagtgaaaaaagtactgacgatgatttgatatggagaacgccaatagtaaaagaggaactcgaggatgctgacaactttttaaaggatgatgccgagttgtatgataaagtcaagaacgagagtgcagtatcacacctggataccatagttatgccgatcattttcacggtactgggcatgttcactagaatgtacaagattggtcgtaataatcatgtggtctgggatgaagctcattttggtaagttcggctcttactatctgagacacgaattttaccatgatgttcatccacctttaggtaaaatgcttgttggactgtctggttatttggctggctacaatggttcttgggacttcccatctggtgaggtttatcccgactatatcgattatgtgaaaatgaggttatttcaagcaatgttttcatcattgtgtgtgccactagcctatttcacaggaagggctatcggattttctaggctgagtgtttggctatttaccattctagtaatttttgagaattcgtatgcaacattaggcaagttcattctccttgattcaatgctacttttctttaccgtctcttcttacttttgccttgccaagttccatactatgagaaagtctcccttttcggctaggtggtggctatggttgtgcctcactgggttgaatttgggttgcgctatatctgtgaaaatggtaggtcttttcatcatcagtgtagtaggaatttacaccatcagtgaactatggaatctcctaagtgatagatcggtgtcttggaaggtttatgtcaaccattggctagcaagaatattcgggcttatcatcattcctgtttgcgtttttttgttatgcttcaaaatccattttgatctgctgtccaactcagggcccggcgactctaccatgccatcattatttcaagccagtctgaacggtacaaaagttggtaagggaccacgtgatgttgctttgggttcttctattatttccatcaaaaatcaagcgttgggaggcgctttattacattctcatgtccaaccattcccagaaggttctgagcaacagcaagtaactgtctatggttacagtgatgctaacaatgaatggttttttcaaagaatcagaggagtagagccttggactgatgctgagaacaagacaattgagtttgtaaagggtggcgaaatgtatagattaatgcatcgcctaacaggcaagaatctacacacccatgaagtcccagcgcctatatcgaaaagtgaatatgaagtttctgcttacggagatgtagacttaggtgactacaaagataactggattatagaaatcgtggaacaagtaggggaagaagatccaacactactacacccgctatccacatctttccgtattaaaaattctatactgggttgctatttagctcagtcaggtaaacatttaccagaatggggtttcaggcaaggtgaagttgtctgtttaaaacacgcctccaaaagggataagagaacctggtggaatatcgaaacacatgaaaatgaaagattgccacagggagaagatttcgtatatccgaagacttcattcttcaggaatttcatgcagttaaattcagcaatgatggcaaccaataatgctttggtaccaaaccctgaaaagtttgatggtatagcttcatctgcctggcaatggccaaccttgaacgtcggggtaagattatgcgaatggagtgaaaaatctataaagtacttcttattaggatctcctgcgtccgtctggccctcaagcatcgcagtttgcgcactgataatacacgttatattcttaactctgaaatggcagagacaatgtgttatcctatccgatccagtcgaacgtgacgtgttcgttatggcagccttttatccattgcttgcttggcttttacattatatgccattcgtagtgatgtcaagagttgtatacgctcaccactatctgcccaccctttattttgccttaatgatcttgtcatactacttcgatatgattaccaaacgttgggctacaagaaacactggaaaatttctaaggctaggagcttatattgtatacggatcaatcgtgatcgctggatttttttatttctctccttttagttttgggatggatggtccagtagatgattacgcgtacttggcatggctacctacgtggcagattgttgaagatatacgtaacacatag

SEQ ID NO: 10744 - DNA, 2262 bp, Artificial Sequence
  Description of Artificial Sequence: Synthetic polynucleotide
atgccgtacagagtggcgacgggctacagtgaaaaaagtactgacgatgatttgatatggagaacgccaatagtaaaagaggaactcgaggatgctgacaactttttaaaggatgatgccgagttgtatgataaagtcaagaacgagagtgcagtaagccacttggataccatagttatgccgatcattttcacggtattaggcatgttcactagaatgtacaagattggtcgtaataatcatgtggtctgggatgaagctcattttggtaagttcggctcttactatttaagacacgaattttaccatgatgttcatccacctttaggtaaaatgcttgttggattatctggttatttggctggctacaatggttcttgggacttcccatctggtgaggtttatcccgactatatcgattatgtgaaaatgaggttatttcaagcaatgttttcttctttgtgtgtgccattggcctatttcacaggaagggctatcggattttctaggttgagtgtttggttatttaccattttagtaatttttgagaattcttatgcaacattaggcaagttcattctccttgattctatgttacttttctttaccgtctcttcttacttttgccttgccaagttccatactatgagaaagtctcccttttctgctaggtggtggttatggttgtgcctcactgggttgaatttgggttgcgctatatctgtgaaaatggtaggtcttttcatcatcagtgtagtaggaatttacaccatcagtgaattatggaatctcttgagtgatagatctgtgtcttggaaggtttatgtcaaccattggttggcaagaatattcgggcttatcatcattcctgtttgcgtttttttgttatgcttcaaaatccattttgatttattatccaactctgggcccggcgactctaccatgccatctttatttcaagccagtttgaacggtacaaaagttggtaagggaccacgtgatgttgctttgggttcttctattatttccatcaaaaatcaagcgttgggaggcgctttattacattctcatgtccaaccattcccagaaggttctgagcaacagcaagtaactgtctatggttacagtgatgctaacaatgaatggttttttcaaagaatcagaggagtagagccttggactgatgctgagaacaagacaattgagtttgtaaagggtggcgaaatgtatagattaatgcatcgcctcacaggcaagaatttacacacccatgaagtcccagcgcctatatccaaaagtgaatatgaagtttctgcttacggagatgtagacttaggtgactacaaagataactggattatagaaatcgtggaacaagtaggggaagaagatccaacattgttgcacccgttatccacatctttccgtattaaaaattctatattaggttgctatttagctcagtctggtaaacatttaccagaatggggtttcaggcaaggtgaagttgtctgtttaaaacacgcctccaaaagggataagagaacctggtggaatatcgaaacacatgaaaatgaaagattgccacagggagaagatttcgtatatccgaagacttctttcttcaggaatttcatgcagttaaattctgcaatgatggcaaccaataatgctttggtaccaaaccctgaaaagtttgatggtatagcttcttctgcctggcaatggccaaccttgaacgtcggggtaagattatgcgaatggagtgaaaaatctataaagtacttcttattaggatctcctgcgtccgtctggccctctagcatcgcagtttgcgcattaataatacacgttatattcttaactttgaaatggcagagacaatgtgttatcttgtccgatccagtcgaacgtgacgtgttcgttatggcagccttttatccattgcttgcttggcttttacattatatgccattcgtagtgatgagtagagttgtatacgctcaccactatttacccaccctttattttgccttaatgatcttgagttactacttcgatatgattaccaaacgttgggctacaagaaacactggaaaatttttaaggttaggagcttatattgtatacggatctatcgtgatcgctggatttttttatttctctccttttagttttgggatggatggtccagtagatgattacgcgtacttggcatggttacctacgtggcagattgttgaagatatacgtaacacatga

SEQ ID NO: 10745 - DNA, 2457 bp, Saccharomyces cerevisiae
atggcattttcacgtcttacatctactcatcagtccaatcataacggctacagtaatagcaacaaaaaaggacaaagtcttccactaaccctttctattgatgtagaatcaccgccatgtgttctttatgggtctgctatggaatcctcaggtgctgtgctaagtggactttttactgtgacggttgtcgatccctacagtagtgctgaagataaatctttaaagaatacagaatctaatgtgtcgactacttctaaaagcctaaaaagaaagagtacatttggttctgcactttcatctagattgtccagcttgtcagcgtcgacgtcaaatatctctccttcaacatcttctacatccatatcgcattctcccacgcctgctaatttaagaataatggctggttataccaagatcaccattacgtcggtaacactaagtttggtacagaagatccatttccataaaccctttgtgcctaatatttcctcaatgcaaacctgtatgaactgtaaaacaaagattacaaacatgaaaagctgggaaattcagagtaatacccaggatctttctgttggaagccactcttacccattttcctatcttataccggggtctgtcccatgttcttcatcgctaggtgctacggctgaaacccaggtcaaatacgaacttatcgctgttgtgacgtatatagatcctcatagaaattccttttcttccggtcattctactcccaggaaagaaggaagctcttctaagaagcggttgttgcaactagcgatgcccatcgccgtgactcgaagtataccgcgcgggcctgataagaattctctaagagtatttcctcctacagagttaactgctgctgctgttcttcctaatgttgtatatcctaaatctacttttcctttggagatgaaattagacggtgtttcttcgggggataggagatggcgaatgcgtaaattgagttggagaattgaagaaactacaagagttaaagcacatgcttgtccagtgcacaagcatgaattgaggcagttagaagagcaggttaaaataaaagagtcagaaaaaagtaaaaagccacgcagtcatattaagcgttatggtgaactaggcccacaaatccgggttgcagtaaactctttagaaaatatgccgtcgcaaaggcttccaggcgagcccggtcgtgaacaagcacctaattcttcgggtccagcgtcaactggtaatgttggacttgatgatgaaaatcctgttaatgaagatgaggaagaccaacccggtagcgaattcatccatcccagtgacgacgctttgcgtcaggagttactaatgcagcaacaacgcgcaagacaacaacaacttcaacaagagctaaaaaacaacagtagtttatttacggaagaggttcggataatatctaagggagaaatgaagagtggatggaaaaccgattttgacaataatggaaagattgagctagttacagaaatagattgtatgggacttaattcaggcgtctctaatccggtaatgcatgcatcgacactacaaactccttccacgggcaataagaagcccagcatcaatgtggcttgcgatatacaggatccaaatttaggtttgtatgtaagccacatcttggcagtggaaatagttgttgcagaagaaacattgcaatatgccaatgggcaacctatacggaaaccaaactccaaaaacaagaaagaaactaataacaatacgatgaatgttcataatcctgatcaacgcttagctgaattatctccaatttttgcaaatagaaatacaccgaaagtacggcgcatggggcctgaagatataacaccggtgaatagtaataagtccaaccatagtactaataaggagaaggcatctaacggtgctagtaactctaatatagtgagtgttcccactggtgcagcacgtgttttaagaatgcaattcagattaacagtcactgaaagatctggacttggaatctcctgggacgaagaagttcctcccatttaccaagatgtcgagttgctctcgccaccatgttacgagctctctataaataatggaatcaaaaataaactttattcaacaatgagtactcctgttagatcagaggatgattttgtgggcggcagcgatgaagatattgggaactatgagagccaagggctcgaacctggtcctaacgtacaggaagtaacgatcacacaaaataaattaacgataccaccaaccgcacatcactaccagcctgcttcctcttcgcaaagatcccttaccacagtacagtcaccaccactggaaagtgttgttagtgtccagggtagtgtaccttttcgtggacatgtgttgacaccacatagcacaagagatatcagaatacaaaacttttccgattttctagattccaatagaataacccagtag

SEQ ID NO: 10746 - DNA, 2457 bp, Artificial Sequence
  Description of Artificial Sequence: Synthetic polynucleotide
atggcattttctcgtcttacatctactcatcagtccaatcataacggctacagtaatagcaacaaaaaaggacaaagtcttccattgaccctttctattgatgtagaatctccgccatgtgttctttatgggtctgctatggaatccagtggtgctgtgttgagtggactttttactgtgacggttgtcgatccctacagtagtgctgaagataaatctttaaagaatacagaatctaatgtgtccactacttctaaaagcttgaaaagaaagagtacatttggttctgcactttcttctagattgtccagcttgagtgcgtctacgtccaatatctctccttctacatcttctacatccatatctcattctcccacgcctgctaatttaagaataatggctggttataccaagatcaccattacgtctgtaacattgagtttggtacagaagatccatttccataaaccctttgtgcctaatatttcctctatgcaaacctgtatgaactgtaaaacaaagattacaaacatgaaaagctgggaaattcagagtaatacccaggatctttctgttggaagccactcttacccattttcctatcttataccggggtctgtcccatgttcttcttctttgggtgctacggctgaaacccaggtcaaatacgaacttatcgctgttgtgacgtatatagatcctcatagaaattccttttcttccggtcattctactcccaggaaagaaggaagctcttctaagaagagattgttgcaattggcgatgcccatcgccgtgactagaagtataccgcgcgggcctgataagaattctttgagagtatttcctcctacagagttaactgctgctgctgttcttcctaatgttgtatatcctaaatctacttttcctttggagatgaaattagacggtgtttcttctggggataggagatggagaatgcgtaaattgagttggagaattgaagaaactacaagagttaaagcacatgcttgtccagtgcacaagcatgaattgaggcagttagaagagcaggttaaaataaaagagagtgaaaaaagtaaaaagccacgcagtcatattaagcgttatggtgaattaggcccacaaatcagagttgcagtaaactctttagaaaatatgccgtctcaaaggcttccaggcgagcccggtcgtgaacaagcacctaattcttctggtccagcgtctactggtaatgttggacttgatgatgaaaatcctgttaatgaagatgaggaagaccaacccggtagcgaattcatccatcccagtgacgacgctttgcgtcaggagttattgatgcagcaacaacgcgcaagacaacaacaacttcaacaagagttgaaaaacaacagtagtttatttacggaagaggttagaataatatctaagggagaaatgaagagtggatggaaaaccgattttgacaataatggaaagattgagttagttacagaaatagattgtatgggacttaatagtggcgtctctaatccggtaatgcatgcaagcacattacaaactccttccacgggcaataagaagcccagcatcaatgtggcttgcgatatacaggatccaaatttaggtttgtatgtaagccacatcttggcagtggaaatagttgttgcagaagaaacattgcaatatgccaatgggcaacctataagaaaaccaaactccaaaaacaagaaagaaactaataacaatacgatgaatgttcataatcctgatcaacgcttagctgaattatctccaatttttgcaaatagaaatacaccgaaagtaagacgcatggggcctgaagatataacaccggtgaatagtaataagtccaaccatagtactaataaggagaaggcatctaacggtgctagtaactctaatatagtgagtgttcccactggtgcagcacgtgttttaagaatgcaattcagattaacagtcactgaaagatctggacttggaatctcctgggacgaagaagttcctcccatttaccaagatgtcgagttgctctctccaccatgttacgagctctctataaataatggaatcaaaaataaactttattctacaatgagtactcctgttagaagtgaggatgattttgtgggcggcagcgatgaagatattgggaactatgagagccaagggctcgaacctggtcctaacgtacaggaagtaacgatcacacaaaataaattaacgataccaccaaccgcacatcactaccagcctgcttcctcttctcaaagatcccttaccacagtacagtctccaccattggaaagtgttgttagtgtccagggtagtgtaccttttcgtggacatgtgttgacaccacatagcacaagagatatcagaatacaaaacttttccgattttttggattccaatagaataacccagtga

SEQ ID NO: 10747 - DNA, 1371 bp, Saccharomyces cerevisiae
atgtccagttcacaacaaatagccaaaaatgcccgtaaagcagggaatattttgaaaaccatctcaaacgagggcagatcagatattttatacaaaattcacgatgccctgaaggctaatgcgcatgccattgaagaagcgaataaaatcgatttagctgttgccaaagagactggcctagcggattctttattgaaacgtctcgacctatttaaaggggacaaatttgaagttatgttacaaggtattaaggatgtagccgaactagaagaccctgttggcaaggttaaaatggccagggaattagatgatggcttgacgttgtaccaagtaaccgctccagtcggcgttttgttagttatctttgaatcccgtccagaagttattgccaatattaccgcattgagtatcaagtctggtaatgctgcaattttgaagggtggtaaagagtctgtgaacacgttcagagaaatggcaaagatcgttaacgacaccattgcacaattccaaagtgagactggtgttcctgtgggctctgtgcaattgatcgaaaccagacaggatgtttccgacttgttggatcaagatgagtacatcgacttagttgttcctcgtggttccaatgccttagtcagaaaaatcaaggacactacaaaaattcccgtgttgggtcatgcggatggtatctgctcaatttacttggatgaagacgcagatttgattaaggcaaaaagaattagtttggatgcaaagactaactacccagctggttgcaacgctatggaaacgttgttgattaacccaaaattctctaagtggtgggaagttctggaaaacttaactttggaaggcggagtgactatccacgctacaaaagatttgaaaactgcgtattttgataaactgaatgagttagggaaattgacagaagcaattcaatgcaaaaccgttgatgctgatgaggagcaagattttgataaggaatttttatccttggatttggctgccaagtttgttacatctacagaatcggccattcaacatataaatacacactcttcgagacataccgacgctattgtaacggaaaataaagcaaacgctgaaaaatttatgaagggtgtcgactcctctggtgtttactggaatgcatcaactagatttgccgatggtttcaggtacggttttggtgctgaagtgggtatttctacctctaagattcacgcccgtggtccagttggcttggacggtctggtgagttatcaataccaaataagaggtgacggccaggttgctagtgactaccttggtgctggtggtaacaaagcttttgttcacaaggatttagatataaagactgtgacattataa

SEQ ID NO: 10748 - DNA, 1371 bp, Artificial Sequence
  Description of Artificial Sequence: Synthetic polynucleotide
atgtccagttctcaacaaatagccaaaaatgcccgtaaagcagggaatattttgaaaaccatctccaacgagggcagaagtgatattttatacaaaattcacgatgccttgaaggctaatgcgcatgccattgaagaagcgaataaaatcgatttagctgttgccaaagagactggcttggcggattctttattgaaacgtctcgacttatttaaaggggacaaatttgaagttatgttacaaggtattaaggatgtagccgaattggaagaccctgttggcaaggttaaaatggccagggaattagatgatggcttgacgttgtaccaagtaaccgctccagtcggcgttttgttagttatctttgaatcccgtccagaagttattgccaatattaccgcattgagtatcaagtctggtaatgctgcaattttgaagggtggtaaagagtctgtgaacacgttcagagaaatggcaaagatcgttaacgacaccattgcacaattccaaagtgagactggtgttcctgtgggctctgtgcaattgatcgaaaccagacaggatgtttccgacttgttggatcaagatgagtacatcgacttagttgttcctcgtggttccaatgccttagtcagaaaaatcaaggacactacaaaaattcccgtgttgggtcatgcggatggtatctgctccatttacttggatgaagacgcagatttgattaaggcaaaaagaattagtttggatgcaaagactaactacccagctggttgcaacgctatggaaacgttgttgattaacccaaaattctctaagtggtgggaagttttggaaaacttaactttggaaggcggagtgactatccacgctacaaaagatttgaaaactgcgtattttgataaattgaatgagttagggaaattgacagaagcaattcaatgcaaaaccgttgatgctgatgaggagcaagattttgataaggaatttttatccttggatttggctgccaagtttgttacatctacagaaagtgccattcaacatataaatacacactcttctagacataccgacgctattgtaacggaaaataaagcaaacgctgaaaaatttatgaagggtgtcgactcctctggtgtttactggaatgcatctactagatttgccgatggtttcaggtacggttttggtgctgaagtgggtatttctacctctaagattcacgcccgtggtccagttggcttggacggtttagtgagttatcaataccaaataagaggtgacggccaggttgctagtgactaccttggtgctggtggtaacaaagcttttgttcacaaggatttagatataaagactgtgacattatga

SEQ ID NO: 10749 - DNA, 1809 bp, Saccharomyces cerevisiae
atgaacttgctaattgaccggatggagaatcccggatcgaggaactgtaccctgttacctccttcattcccaagaggcttttgtaagggaagaagggcttccagtggcgacgcagtgaagataaaagaatccggtctacagccgcagccgcagccggaacctctacaagctaaaacaaatgttgcacacttttcgaaatcatcttctagattacctgtcatagcagtgaatgataatccggtggtcccaagaccaagcactgaagtaaacttgggatcgttgttacaaaaggaaagggagaaagaaaaggaggaacagcctgcgctgcatgataggagacatttatatgtgacaaagaatagggcacatggggtacgacaacgttcattggaaatgactagcttacctgtcctgggatcgaccaaaaccgggaagtttagcgattttttgtttgaagatgacatcgataacagagtaggtcgacacagtagatcatatagtggggcatccagtttggatgatccattcagagtgtcgccgaaaaccgacttcaactctaatagggccagattgtcttgccttagtaaaggacgtcgtggttcgatgtccgttttccaaagctgtcatactgggctagctttcaatcaaatacagggttcctcctcttcgcaacgtagatcatccgctggttcttttgattatgagaggaaacgattggttaaccaatttttacagccttctttgggaaattcagacccatttgatacgttgagggagtcggtagtgtttgagccctcatccaccgctggcggcattaaattagggaatatgcattctcaatcacaaatttccgtaaactcctcccccagcacatctttgttttatcatgatttggacggttctgctgtcaacgattcttcgtcatttctgtattcccgttctaatgtaccagcatttttgtcgtcatcagccttttcgtccacgtcatccacctcatcagattcagaagatgtggatagaagaagtttaaacggtgtatatccctctttaggatatttgactaaccagaggaaaccaaggaattcatcaggctcttccactgcacctggcaccgataccttgggatttaagtatttactgaataggcagaagtcagcggattcttccactaggttcaagagtgtactgaaggtgaacaataataatggctccgcagccactcctgattctagctcaaactctatttcgaagagcaactcaaatttgaatgataacattgatgaattgaattattatcaaaatcatatttcgacacttctagtgaagatcgagaatgagatgagaagaaatttaaacgatacaataatcaagaatgaaaacaacgttcaaaaaactatccaaaagtatgatcttctatcaggagagttaacccttttattagacgaaatgaccaccttgcgaaccacggtgattaatcaattcttggtcaagttgaaatcagactttgacgaggatgacaataaggcgtttattaatgaattaaagatatcagtcgaagaaagtgtagcgcaattacaaggattggaaaggagaatggaggtttgccaagagagattaaataaacaaaagtcctctctaagggaaatggatagtttgatagagctgaaaaacgtgttaaataaatcgaagaacaacacgaaatccatctacctgtataggtatttcatcattgacattattgcatttcttttgatgggcggctttatcgtttacgtcaagaatttgttaactcgtttttttactcgttaa

SEQ ID NO: 10750 - DNA, 1809 bp, Artificial Sequence
  Description of Artificial Sequence: Synthetic polynucleotide
atgaacttgttaattgacagaatggagaatcccggatctaggaactgtaccttattacctccttctttcccaagaggcttttgtaagggaagaagggcttccagtggcgacgcagtgaagataaaagaatccggtttacagccgcagccgcagccggaacctttacaagctaaaacaaatgttgcacacttttccaaatcttcttctagattacctgtcatagcagtgaatgataatccggtggtcccaagaccaagcactgaagtaaacttgggatctttgttacaaaaggaaagggagaaagaaaaggaggaacagcctgcgttgcatgataggagacatttatatgtgacaaagaatagggcacatggggtaaggcaacgttctttggaaatgactagcttacctgtccttggatctaccaaaaccgggaagtttagcgattttttgtttgaagatgacatcgataacagagtaggtagacacagtagatcttatagtggggcatccagtttggatgatccattcagagtgtctccgaaaaccgacttcaactctaatagggccagattgtcttgccttagtaaaggacgtcgtggttctatgtccgttttccaaagctgtcatactgggttggctttcaatcaaatacagggttcctcctcttctcaacgtagaagttccgctggttcttttgattatgagaggaaaagattggttaaccaatttttacagccttctttgggaaatagtgacccatttgatacgttgagggagagtgtagtgtttgagccctcttccaccgctggcggcattaaattagggaatatgcattctcaatctcaaatttccgtaaactcctcccccagcacatctttgttttatcatgatttggacggttctgctgtcaacgattcttcttcttttttatattcccgttctaatgtaccagcatttttgagttcttctgccttttcttccacgtcttccacctcttctgattctgaagatgtggatagaagaagtttaaacggtgtatatccctctttaggatatttgactaaccagaggaaaccaaggaattcttctggctcttccactgcacctggcaccgataccttgggatttaagtatttattgaataggcagaagtctgcggattcttccactaggttcaagagtgtattgaaggtgaacaataataatggctccgcagccactcctgattctagcagtaactctatttccaagagcaacagtaatttgaatgataacattgatgaattgaattattatcaaaatcatatttctacacttttagtgaagatcgagaatgagatgagaagaaatttaaacgatacaataatcaagaatgaaaacaacgttcaaaaaactatccaaaagtatgatcttttatctggagagttaacccttttattagacgaaatgaccaccttgagaaccacggtgattaatcaattcttggtcaagttgaaaagtgactttgacgaggatgacaataaggcgtttattaatgaattaaagatatctgtcgaagaaagtgtagcgcaattacaaggattggaaaggagaatggaggtttgccaagagagattaaataaacaaaagtcctctttgagggaaatggatagtttgatagagttgaaaaacgtgttaaataaatccaagaacaacacgaaatccatctacttatataggtatttcatcattgacattattgcatttcttttgatgggcggctttatcgtttacgtcaagaatttgttaactcgtttttttactcgttga

SEQ ID NO: 10751 - DNA, 4725 bp, Saccharomyces cerevisiae
atgtcttttgaagtgggtacacgatgctggtatccccataaagaattgggctggattggggcggaagtaatcaaaaatgagttcaacgacggcaagtaccacctggagttacaattggaagacgatgaaatcgtgtccgtggacacaaaagacttgaataacgataaggaccaatctctaccgcttcttagaaaccctcccattttggaagcaacggaagatttgacctctttatcttacttgaatgagccagctgttttacatgccatcaaacagcgctattctcaattgaatatctacacatactcgggtattgttctgattgctacaaacccttttgatcgtgtcgaccagctttatacacaagacatgatccaagcatatgcgggaaagcgcagaggtgaactggaacctcacttgtttgccattgccgaagaagcgtataggttgatgaaaaatgacaaacaaaatcaaaccattgtggtaagtggtgaatctggtgctggaaaaacggtttctgccaagtatattatgcgttattttgcttctgtagaagaggaaaattccgctactgtacaacatcaagtggaaatgtcggaaacagaacaaaagattctagctacaaaccctatcatggaagcatttggtaatgctaagactaccagaaatgacaattcttccagatttggtaagtatctagaaattttattcgataaggacacatctattattggagcaaggatccgcacatacttgttggaacggtccagattagtttaccagccgccaattgagagaaactaccacatattttatcaattaatggctggattaccagctcaaaccaaggaggaattgcatcttaccgatgcctcagattacttctacatgaaccaaggcggtgacaccaagatcaacggtattgatgatgccaaagaatacaaaattacagtagatgcattgacattagtcggaatcaccaaggaaactcaacaccaaatatttaagatcttggccgcacttctgcatatcggtaacatagaaattaaaaaaactagaaatgatgcatcactatcagctgatgagccaaacctgaaactggcgtgcgaattgctgggaattgatgcctacaactttgccaaatgggtcaccaaaaagcagatcattacaaggtcagagaaaattgtttcgaatctaaattatagtcaagctctggttgccaaagattccgtggctaagtttatttattccgcccttttcgattggcttgtggaaaatatcaacaccgtgttatgcaacccggctgtgaacgaccaaattagctcatttattggtgttctggatatttatgggtttgaacattttgaaaaaaattcatttgaacaattttgtattaactatgccaacgaaaaactacaacaagagttcaaccaacatgttttcaaattagagcaagaagaatacgttaaagaagaaattgaatggtcttttatagagtttaatgataatcaaccttgtattgatctgattgaaaacaagttgggtattttatcactgcttgacgaagaaagtaggttacctgctggttccgacgaatcttggacccaaaaactttatcaaactttggataaatctcctacgaacaaagtattttctaaaccaagattcgggcaaactaaatttatcgtgagccattatgctctagatgtcgcttatgatgtggaaggatttattgaaaaaaatagagacaccgtatctgacggacatttggaagtgttgaaggcttctaccaacgagacactaataaatatcttagagggattagaaaaagctgccaaaaaactggaagaagcgaaaaagcttgaattagagcaggctggcagtaaaaagccaggtccgataagaacggttaacaggaaacccactttaggttccatgtttaagcaatctttgattgaactaatgaataccatcaactcaactaatgttcattatattcgttgtataaagcctaatgcagataaagaagcttggcaatttgataatttgatggtgttgtctcaactcagagcctgtggtgttttggaaactattagaatatcttgtgctgggtttccttctaggtggacttttgaagaatttgtattaagatattacatcttgataccacatgagcagtgggacctaatcttcaaaaaaaaggaaactacagaagaagatatcatatcagtggttaaaatgatcctagatgctactgtaaaggacaaatccaagtaccagattggtaatacaaaaattttcttcaaagcaggtatgcttgcatatctggaaaaacttagaagcaataagatgcataattcaattgttatgatccagaagaaaattagagctaaatattaccgtaagcagtatttgcaaatatctcaggccatcaagtatttgcagaacaacatcaaaggtttcatcattcgtcaacgcgttaatgatgaaatgaaagttaactgtgcaactttattacaggccgcttacaggggtcattccatccgtgccaatgtgttcagcgtattgagaacaattacaaatttgcaaaagaaaattagaaaggaactaaaacaaagacaactgaaacaagaacatgaatataatgctgcggtaactattcaaagtaaagttaggacctttgagccgagatcgagatttttacgcactaaaaaagacactgttgttgtccaatctttgatcagaagaagagctgctcaaaggaaattgaaacaattgaaggcagacgctaaatcagttaatcatctgaaagaagtgagctataaattagagaataaagtgattgaactgacgcagaatctagcatccaaggtcaaagaaaataaagaaatgacagaaagaattaaagaactacaggttcaagtggaagaaagtgccaagttacaagagacattagaaaatatgaaaaaagagcacttaatagatattgataatcagaaatctaaggatatggaattacaaaaaactattgagaacaatttgcaatccactgaacaaactctaaaggacgctcaattagagttggaggacatggttaaacaacatgatgaattgaaagaagaatctaaaaagcaacttgaagaattagagcaaacaaagaaaacattggttgaataccagacattaaacggagacttgcaaaacgaagttaaatctttaaaggaagaaattgctaggttacaaactgccatgtcgctgggcaccgttactactagtgtactacctcaaacaccattaaaggatgtaatgggaggcggtgcttcaaatttcaacaatatgatgcttgagaattccgacttatctcctaatgatttgaatctaaagtctagatctactccatcgtccggaaacaaccacattgattcattgagtgtcgatcgcgaaaatggtgtcaatgctacacaaatcaatgaagagttatacaggttattggaggacactgaaattttgaatcaagaaatcacggaaggcctgttaaagggattcgaagtaccggatgctggtgtagctattcaactaagtaaaagagacgttgtttatccggctagaatactgattatagttttaagtgaaatgtggagatttgggctgaccaagcaaagtgaaagctttcttgcccaagtattgactacaattcaaaaagttgtcactcaattgaagggtaacgatttaattccaagcggtgtattctggttagcaaacgttagagagttatactcatttgtggtgtttgctctaaactctattttaaccgaagaaacgttcaaaaacggcatgaccgatgaggagtataaggagtatgtttcattggtcacagaactaaaggatgatttcgaagctctaagttataatatatataacatttggctgaagaaattgcagaagcaattgcaaaaaaaggccatcaatgctgtggtcatctccgaatcattaccaggtttcagcgcgggagaaaccagcgggtttttgaacaaaatttttgctaacactgaagaatatacaatggacgacattttgacctttttcaacagcatatactggtgcatgaaatcttttcatattgagaatgaagtgttccatgctgtagtcacaaccttattgaattatgtggatgcaatttgttttaacgaattaatcatgaaacgtaatttcttgtcgtggaaaaggggtcttcaattgaactacaacgttactagattagaggaatggtgcaagacgcatggcttgacagatggtactgagtgcttacaacatttgattcagaccgctaagctactgcaagtccgtaagtatactatcgaagacattgatatcttaagaggaatttgttattcgctaacacctgcacaattgcaaaaattgatttcacaataccaggtggcagactatgagtctccaattccacaggaaatcttaagatacgttgctgatatagttaagaaagaagctgcgttatcttcatcaggtaatgattctaagggtcacgagcatagcagcagtatatttatcactccagaaacaggtccatttactgacccattcagtttgataaagacaagaaaatttgaccaagtagaagcctatataccagcgtggttatccttgccctcaactaagagaatagttgaccttgttgcccaacaagtcgttcaagacggccactaa

SEQ ID NO: 10752 - DNA, 4725 bp, Artificial Sequence
  Description of Artificial Sequence: Synthetic polynucleotide
atgtcttttgaagtgggtacaaggtgctggtatccccataaagaattgggctggattggggcggaagtaatcaaaaatgagttcaacgacggcaagtaccacttagagttacaattggaagacgatgaaatcgtgtccgtggacacaaaagacttgaataacgataaggaccaatctttaccgcttcttagaaaccctcccattttggaagcaacggaagatttgacctctttatcttacttgaatgagccagctgttttacatgccatcaaacagcgctattctcaattgaatatctacacatactctggtattgttttgattgctacaaacccttttgatcgtgtcgaccagctttatacacaagacatgatccaagcatatgcgggaaagcgcagaggtgaattggaacctcacttgtttgccattgccgaagaagcgtataggttgatgaaaaatgacaaacaaaatcaaaccattgtggtaagtggtgaatctggtgctggaaaaacggtttctgccaagtatattatgcgttattttgcttctgtagaagaggaaaattccgctactgtacaacatcaagtggaaatgtctgaaacagaacaaaagattttggctacaaaccctatcatggaagcatttggtaatgctaagactaccagaaatgacaattcttccagatttggtaagtatttggaaattttattcgataaggacacatctattattggagcaaggatccgcacatacttgttggaaagatccagattagtttaccagccgccaattgagagaaactaccacatattttatcaattaatggctggattaccagctcaaaccaaggaggaattgcatcttaccgatgcctctgattacttctacatgaaccaaggcggtgacaccaagatcaacggtattgatgatgccaaagaatacaaaattacagtagatgcattgacattagtcggaatcaccaaggaaactcaacaccaaatatttaagatcttggccgcacttttacatatcggtaacatagaaattaaaaaaactagaaatgatgcatctttatctgctgatgagccaaacttgaaattagcgtgcgaattgttgggaattgatgcctacaactttgccaaatgggtcaccaaaaagcagatcattacaaggagtgagaaaattgtttctaatttgaattatagtcaagctttggttgccaaagattccgtggctaagtttatttattccgcccttttcgattggcttgtggaaaatatcaacaccgtgttatgcaacccggctgtgaacgaccaaattagctcctttattggtgttttggatatttatgggtttgaacattttgaaaaaaattcttttgaacaattttgtattaactatgccaacgaaaaattacaacaagagttcaaccaacatgttttcaaattagagcaagaagaatacgttaaagaagaaattgaatggtcttttatagagtttaatgataatcaaccttgtattgatttgattgaaaacaagttgggtattttatctttacttgacgaagaaagtaggttacctgctggttccgacgaatcttggacccaaaaactttatcaaactttggataaatctcctacgaacaaagtattttctaaaccaagattcgggcaaactaaatttatcgtgagccattatgctttagatgtcgcttatgatgtggaaggatttattgaaaaaaatagagacaccgtatctgacggacatttggaagtgttgaaggcttctaccaacgagacattaataaatatcttagagggattagaaaaagctgccaaaaaattagaagaagcgaaaaagcttgaattagagcaggctggcagtaaaaagccaggtccgataagaacggttaacaggaaacccactttaggttccatgtttaagcaatctttgattgaattgatgaataccatcaactctactaatgttcattatattcgttgtataaagcctaatgcagataaagaagcttggcaatttgataatttgatggtgttgtctcaactcagagcctgtggtgttttggaaactattagaatatcttgtgctgggtttccttctaggtggacttttgaagaatttgtattaagatattacatcttgataccacatgagcagtgggacttgatcttcaaaaaaaaggaaactacagaagaagatatcatatctgtggttaaaatgatcttagatgctactgtaaaggacaaatccaagtaccagattggtaatacaaaaattttcttcaaagcaggtatgcttgcatatttggaaaaacttagaagcaataagatgcataattctattgttatgatccagaagaaaattagagctaaatattaccgtaagcagtatttgcaaatatctcaggccatcaagtatttgcagaacaacatcaaaggtttcatcattcgtcaacgcgttaatgatgaaatgaaagttaactgtgcaactttattacaggccgcttacaggggtcattccatccgtgccaatgtgttcagcgtattgagaacaattacaaatttgcaaaagaaaattagaaaggaattgaaacaaagacaattgaaacaagaacatgaatataatgctgcggtaactattcaaagtaaagttaggacctttgagccgagatctagatttttacgcactaaaaaagacactgttgttgtccaatctttgatcagaagaagagctgctcaaaggaaattgaaacaattgaaggcagacgctaaatctgttaatcatttgaaagaagtgagctataaattagagaataaagtgattgaattgacgcagaatttggcatccaaggtcaaagaaaataaagaaatgacagaaagaattaaagaattacaggttcaagtggaagaaagtgccaagttacaagagacattagaaaatatgaaaaaagagcacttaatagatattgataatcagaaatctaaggatatggaattacaaaaaactattgagaacaatttgcaatccactgaacaaactttgaaggacgctcaattagagttggaggacatggttaaacaacatgatgaattgaaagaagaatctaaaaagcaacttgaagaattagagcaaacaaagaaaacattggttgaataccagacattaaacggagacttgcaaaacgaagttaaatctttaaaggaagaaattgctaggttacaaactgccatgtctttaggcaccgttactactagtgtattacctcaaacaccattaaaggatgtaatgggaggcggtgcttctaatttcaacaatatgatgcttgagaattccgacttatctcctaatgatttgaatttgaagtctagatctactccatcttccggaaacaaccacattgattctttgagtgtcgatcgcgaaaatggtgtcaatgctacacaaatcaatgaagagttatacaggttattggaggacactgaaattttgaatcaagaaatcacggaaggcttattaaagggattcgaagtaccggatgctggtgtagctattcaattgagtaaaagagacgttgtttatccggctagaatattgattatagttttaagtgaaatgtggagatttgggttaaccaagcaaagtgaaagctttcttgcccaagtattgactacaattcaaaaagttgtcactcaattgaagggtaacgatttaattccaagcggtgtattctggttagcaaacgttagagagttatactcttttgtggtgtttgctttgaactctattttaaccgaagaaacgttcaaaaacggcatgaccgatgaggagtataaggagtatgtttctttggtcacagaattgaaggatgatttcgaagctttaagttataatatatataacatttggttaaagaaattgcagaagcaattgcaaaaaaaggccatcaatgctgtggtcatctccgaatctttaccaggtttcagcgcgggagaaaccagcgggtttttgaacaaaatttttgctaacactgaagaatatacaatggacgacattttgacctttttcaacagcatatactggtgcatgaaatcttttcatattgagaatgaagtgttccatgctgtagtcacaaccttattgaattatgtggatgcaatttgttttaacgaattaatcatgaaacgtaatttcttgtcctggaaaaggggtcttcaattgaactacaacgttactagattagaggaatggtgcaagacgcatggcttgacagatggtactgagtgcttacaacatttgattcagaccgctaagttattacaagtccgtaagtatactatcgaagacattgatatcttaagaggaatttgttattctttaacacctgcacaattgcaaaaattgatttctcaataccaggtggcagactatgagtctccaattccacaggaaatcttaagatacgttgctgatatagttaagaaagaagctgcgttatcttcttctggtaatgattctaagggtcacgagcatagcagcagtatatttatcactccagaaacaggtccatttactgacccattcagtttgataaagacaagaaaatttgaccaagtagaagcctatataccagcgtggttatccttgccctccactaagagaatagttgaccttgttgcccaacaagtcgttcaagacggccactga

SEQ ID NO: 10753 - DNA, 348 bp, Saccharomyces cerevisiae
atgtcgtcatcagtgccatacgatccatatgtgcctccagaggagagtaactcaggcgcaaacccaaattcccaaaacaagactgctgctttgagacaagagattgatgacacggtgggaataatgagagataatatcaacaaggttgctgaacgtggtgaaaggctaacatccattgaggacaaagctgataacttggctatctccgcacaaggattcaagagaggcgccaacagggtcagaaagcaaatgtggtggaaagatctaaaaatgagaatgtgtttattcttagttgttattattttactagtggtaattatcgttcctatcgtcgtccatttcagctaa

SEQ ID NO: 10754 - DNA, 348 bp, Artificial Sequence
  Description of Artificial Sequence: Synthetic polynucleotide
atgtcttcttctgtgccatacgatccatatgtgcctccagaggagagtaacagtggcgcaaacccaaattcccaaaacaagactgctgctttgagacaagagattgatgacacggtgggaataatgagagataatatcaacaaggttgctgaacgtggtgaaaggttgacatccattgaggacaaagctgataacttggctatctccgcacaaggattcaagagaggcgccaacagggtcagaaagcaaatgtggtggaaagatttgaaaatgagaatgtgtttattcttagttgttattattttattggtggtaattatcgttcctatcgtcgtccatttcagctga

SEQ ID NO: 10755 - DNA, 4695 bp, Saccharomyces cerevisiae
atgttgcaagcgccctcaagttcaaactcgggtttgaatcaaggaaatgctgcgccggacggcccacctaacgaaacacagccgtacgaaggcctcgacgcggcagctcaagaagaaataaaagaattggcaagaacgctgacgagccaatcttcccttttatcgcaagaaaagcgtattaccggcactggcgacccgaatacactaactgctgcttcttcatcgtcattgagccggtcaattttcgctagtgatatcaagggagttaacccaatccttttggacgtcaatgatccagactacgatgagacattggatcctcgatcagaaaatttctcgagtgtcagatgggtacgaaatatggcacaaatatgcgagaatgattcggatttctataaaccgttttcattaggttgcgcctggaaagatttgagtgcctccggtgattctgccgatataacatatcagggaacatttggtaatatgcccatcaaatacttgaaaatgagttggaggtgcatatcccgacgtcttttccaccggacacatggcaagagtgaagataatgactccggtttccaaattttgaagccgatggacggatgcatcaatccgggggaactacttgttgtgcttggacgacccggtgcaggatgtactacgctgctgaaatctatatctgtaaatacacacggattcaagatttctccggacacaatcatcacgtacaatggattctccaacaaagagatcaaaaaccattaccgtggtgaagtggtctacaatgcagaatcagacattcacatcccgcacttgacagtattccaaactttatacacagtggcaagactgaagacaccaaggaaccgaatcaagggtgtcgatagggacacatttgccaaacacatgactgaagtggcaatggcaacttacggactgagccacactgcagatacaaaagtgggtaatgattttgttcgtggtgtatccgggggagaaaggaaaagagtttccattgctgaagtgtctatatgtggctcgaagtttcagtgctgggataatgccacgaggggcttagattctgctaccgcgctggagttcatcaaggccttgaaaacgcaagccactatcacaaagtctgcagccactgtggccatttaccaatgttctaaagatgcctatgatttgttcgataaagtctgtgttctttacgatggttaccaaatcttctttggcccaagtaagcaggccaaaaagtactttcaaagaatgggatatgtgtgtcccgaaaggcagaccacagcagattatttgacctctattactagtccttctgaaagaattaaggacaaagacatggtcaaacatggaattatgatcccacaaacggcctatgaaatgaaccagtactggattcaatcagaggaatacaaacaattacaggtgcaggtgaacaaacatttagatacagactcttcccagcaaagagaacaaataaaaaatgcacatattgccaaacaatctaagagagcacggccctcctctccttatacagtaagtttctttttgcaagttaagtatattctaatcagggatatatggaggattaagaatgacccaagtattcaacttttcacggttttgagtcatgcagcaatggctcttatcttgggatcaatgttttatgaagtcatgctttccactaccacaacaaccttttattaccgaggcgcggctattttttttgctattctgttcaatgcgttctcatcacttttagagatcttttcactctatgagacgaggcccattaccgaaaagcacaagacttactcgttatatcgcccaagtgctgatgccttcgcctctacattttctgatgttccaacaaaattagccacggcagtaactttcaacataccatattattttttaatcaatctaaaaagagatgccggtgcttttttcttttactttttaataaacattataacagtttttgctatgtcgcatttgttcagatgcattggctcagtgtcgaaaactttacctcaggcaatggttcccgcatctgttcttctgttagcttttgcaatgtacactgggtttgccatcccaagagtccaaatgcttggctggtcaaaatggatttcttatatcaacccattgtcttacctttttgaatcgctaatgattaacgaatttcatggtagaaatttcccatgtgctcagtatatacctagtgggccaaattatgtcaacgcaacaggtgacgaagtcacctgctccgccctcggttctatcccaggaaataattatgtaagtggtgatgatttcattcaaacgaactacggctatcgacataagaacaaatggcggtctgttggtattggtttagcatacattatttttttcttatttctgtatttattcttttgtgaatacaatgaaggagcaaagcaaaatggtgagatgttagtatttccccatagtgtggttaaaaagatgaagaagaagggtattgtctctgagaagaaaaagaaaaaccaaccaacgttgtcaacatctgatgctgagaaagatgtagagatgaacaacaattcaagtgcgactgattcaagatttttacgcgattctgatgcagctataatgggtaacgataaaactgtcgccaaggagcattattcatctccttcatcttctgcgtctcaaagcaatagttttagtaaaagtgatgacattgaattgtccaaatcacaagcgatttttcattggaaaaacttatgctacgatatcccgattaagaatgggaagaggagaattttggataatgttgatggttgggtcaagcctggtacactaactgccttgattggcgcatctggtgcaggaaaaacaacgttattagattgtcttgccgagagaaccacgatgggtttaatcactggtgatgtattcgtagatggtagaccgcgggaccagtctttccccagatcaattggttattgtcagcagcaggatttgcatttgaaaaccgcaactgtgagagagtcattaaggttttccgcgtacctgcgtcaagccgatgatgtatccatcgaggagaaagataaatacgttgaagaagtcattgaggtattggagatgaaactttatgctgatgccatagtaggcgttcctggtgaaggtttaaatgtggaacaaagaaaaaggttaaccataggtgtggagttagctgccaaaccaaaactgttggtatttttagatgagcccacgtctgggcttgattcccaaactgcatggtcaacttgtcaattaatgaagaaattggctagtcgcggacaagcaattttatgtaccattcatcaaccttctgctctcttaatgcaagagtttgataggttactatttttgcaagagggcggacaaactgtatattttggagagctagggaaaggttgcaaaacaatgattaactatttcgaagctcatggtgcccataaatgcccaccagatgccaatccagccgaatggatgttagaaatagtaggtgctgcaccaggaactcacgctagtcaagattattttgccatttggagagattctgaagaatatagggaaatgcagaaagagttggactggatggaacgagaattgcctaaacggacggaaggttcgtcaaatgaggagcagaaggagttcgctacgtcaactttgtaccagatcaaattggtgagttatcgattattccatcaatattggagaacaccattttacttatggtcaaaatttttttcaacaattgtgtctgaactcttcataggcttcacttttttcaaggcgaatacatcattacagggcctacagaatcaaatgctggccatttttatgtttacagtggtattcaacccaatattgcaacaatatttaccacttttcgttcagcagagggaactttatgaagctagagaaaggccatcaagaaccttttcgtggaaagcatttattgtatcgcagattctcgtggaaatcccttggaatttactggccggtactatagcttttttcgtctattattatcctgttggattttacagaaatgcttcttatgcaaatcaacttcatgaacgaggagctttattttggttatttgcgtgcgcgttttacgtctacatcagttcaatgggggtattagtgatttcatgcattgaaattgcagaaaatgctgcgaatctcgcttcacttttctttataatgtcattatctttctgcggtgttctggctacgccaaatattctaccaagattctggatttttatgtatagagtatcgccactgacatacctcattgatgctctgctatcggtaggactggccaatgctagtgtcgtttgttccagcaacgaacttttaaaaattgttcctccaagcggtatgacatgctcggaatatatggaaccttatatgcaatccaccgggacgggttatctgctcgatgggagttccgaaactgaatgtcacttttgtcaattcagttctaccaatgattatctggcgactgtgagttcttcgtattcacgtagatggatgaactatggcatttttagtgcatatattgtctttgactattgtgcagcaatatttttatactggctggtgcgggttccaaagaaaagcaaaaaattaaagaaataa

SEQ ID NO: 10756 - DNA, 4695 bp, Artificial Sequence
  Description of Artificial Sequence: Synthetic polynucleotide
atgttgcaagcgcccagtagtagtaacagtggtttgaatcaaggaaatgctgcgccggacggcccacctaacgaaacacagccgtacgaaggcctcgacgcggcagctcaagaagaaataaaagaattggcaagaacgttaacgagccaatcttcccttttatctcaagaaaagcgtattaccggcactggcgacccgaatacattgactgctgcttcttcttcttctttgagcagatctattttcgctagtgatatcaagggagttaacccaatccttttggacgtcaatgatccagactacgatgagacattggatcctagaagtgaaaatttctctagtgtcagatgggtaagaaatatggcacaaatatgcgagaatgattctgatttctataaaccgttttctttaggttgcgcctggaaagatttgagtgcctccggtgattctgccgatataacatatcagggaacatttggtaatatgcccatcaaatacttgaaaatgagttggaggtgcatatcccgtcgtcttttccacagaacacatggcaagagtgaagataatgactccggtttccaaattttgaagccgatggacggatgcatcaatccgggggaattgcttgttgtgcttggaaggcccggtgcaggatgtactacgttattgaaatctatatctgtaaatacacacggattcaagatttctccggacacaatcatcacgtacaatggattctccaacaaagagatcaaaaaccattaccgtggtgaagtggtctacaatgcagaaagtgacattcacatcccgcacttgacagtattccaaactttatacacagtggcaagattaaagacaccaaggaacagaatcaagggtgtcgatagggacacatttgccaaacacatgactgaagtggcaatggcaacttacggattaagccacactgcagatacaaaagtgggtaatgattttgttcgtggtgtatccgggggagaaaggaaaagagtttccattgctgaagtgtctatatgtggctccaagtttcagtgctgggataatgccacgaggggcttagattctgctaccgcgctcgagttcatcaaggccttgaaaacgcaagccactatcacaaagtctgcagccactgtggccatttaccaatgttctaaagatgcctatgatttgttcgataaagtctgtgttctttacgatggttaccaaatcttctttggcccaagtaagcaggccaaaaagtactttcaaagaatgggatatgtgtgtcccgaaaggcagaccacagcagattatttgacctctattactagtccttctgaaagaattaaggacaaagacatggtcaaacatggaattatgatcccacaaacggcctatgaaatgaaccagtactggattcaaagtgaggaatacaaacaattacaggtgcaggtgaacaaacatttagatacagactcttcccagcaaagagaacaaataaaaaatgcacatattgccaaacaatctaagagagcaagaccctcctctccttatacagtaagtttctttttgcaagttaagtatattttgatcagggatatatggaggattaagaatgacccaagtattcaacttttcacggttttgagtcatgcagcaatggctcttatcttgggatccatgttttatgaagtcatgctttccactaccacaacaaccttttattacagaggcgcggctattttttttgctattcttttcaatgcgttctcttctcttttagagatcttttctctctatgagacgaggcccattaccgaaaagcacaagacttactctttatatcgcccaagtgctgatgccttcgcctctacattttctgatgttccaacaaaattagccacggcagtaactttcaacataccatattattttttaatcaatttgaaaagagatgccggtgcttttttcttttactttttaataaacattataacagtttttgctatgtcccatttgttcagatgcattggctctgtgtctaaaactttacctcaggcaatggttcccgcatctgttcttttattagcttttgcaatgtacactgggtttgccatcccaagagtccaaatgcttggctggtccaaatggatttcttatatcaacccattgtcttacctttttgaatctttgatgattaacgaatttcatggtagaaatttcccatgtgctcagtatatacctagtgggccaaattatgtcaacgcaacaggtgacgaagtcacctgctccgccctcggttctatcccaggaaataattatgtaagtggtgatgatttcattcaaacgaactacggctatagacataagaacaaatggagatctgttggtattggtttagcatacattatttttttcttatttttatatttattcttttgtgaatacaatgaaggagcaaagcaaaatggtgagatgttagtatttccccatagtgtggttaaaaagatgaagaagaagggtattgtctctgagaagaaaaagaaaaaccaaccaacgttgagtacatctgatgctgagaaagatgtagagatgaacaacaatagtagtgcgactgattccagatttttacgcgattctgatgcagctataatgggtaacgataaaactgtcgccaaggagcattattcttctccttcttcttctgcgtctcaaagcaatagttttagtaaaagtgatgacattgaattgtccaaatctcaagcgatttttcattggaaaaacttatgctacgatatcccgattaagaatgggaagaggagaattttggataatgttgatggttgggtcaagcctggtacattgactgccttgattggcgcatctggtgcaggaaaaacaacgttattagattgtcttgccgagagaaccacgatgggtttaatcactggtgatgtattcgtagatggtagaccgagggaccagtctttccccagatctattggttattgtcagcagcaggatttgcatttgaaaaccgcaactgtgagagagtctttaaggttttccgcgtacttgcgtcaagccgatgatgtatccatcgaggagaaagataaatacgttgaagaagtcattgaggtattggagatgaaactttatgctgatgccatagtaggcgttcctggtgaaggtttaaatgtggaacaaagaaaaaggttaaccataggtgtggagttagctgccaaaccaaaacttttggtatttttagatgagcccacgtctgggcttgattcccaaactgcatggtctacttgtcaattaatgaagaaattggctagtcgcggacaagcaattttatgtaccattcatcaaccttctgctctcttaatgcaagagtttgataggttactttttttgcaagagggcggacaaactgtatattttggagagttagggaaaggttgcaaaacaatgattaactatttcgaagctcatggtgcccataaatgcccaccagatgccaatccagccgaatggatgttagaaatagtaggtgctgcaccaggaactcacgctagtcaagattattttgccatttggagagattctgaagaatatagggaaatgcagaaagagttggactggatggaaagagaattgcctaaaagaacggaaggttcttccaatgaggagcagaaggagttcgctacgtctactttgtaccagatcaaattggtgagttatagattattccatcaatattggagaacaccattttacttatggtccaaatttttttctacaattgtgtctgaactcttcataggcttcacttttttcaaggcgaatacaagtttacagggcttgcagaatcaaatgttggccatttttatgtttacagtggtattcaacccaatattgcaacaatatttaccacttttcgttcagcagagggaactttatgaagctagagaaaggccatctagaaccttttcttggaaagcatttattgtatctcagattctcgtggaaatcccttggaatttattagccggtactatagcttttttcgtctattattatcctgttggattttacagaaatgcttcttatgcaaatcaacttcatgaaagaggagctttattttggttatttgcgtgcgcgttttacgtctacatcagttctatgggggtattagtgatttcttgcattgaaattgcagaaaatgctgcgaatctcgcttctcttttctttataatgtctttatctttctgcggtgttttggctacgccaaatattttaccaagattctggatttttatgtatagagtatctccattaacatacctcattgatgctttgctttctgtaggattggccaatgctagtgtcgtttgttccagcaacgaacttttaaaaattgttcctccaagcggtatgacatgcagtgaatatatggaaccttatatgcaatccaccgggacgggttatttgctcgatgggagttccgaaactgaatgtcacttttgtcaattcagttctaccaatgattatttggcgactgtgagttcttcttattctcgtagatggatgaactatggcatttttagtgcatatattgtctttgactattgtgcagcaatatttttatactggttggtgagagttccaaagaaaagcaaaaaattaaagaaatga

SEQ ID NO: 10757 - DNA, 2619 bp, Saccharomyces cerevisiae
atgtcgtttgattggcttaatgttccgggattggacttaagcagcggggaccaagcagaaaagaggccatcgaatggattaggaccacccagtgtgtcttttgattttggtataaatactgctgctccacatgattccagcttttgggatcagggatcaagaagtcacagtgatacaactttgtcttacagaaataatcactcaaatacagcagctgataatgccactaacgtgagctctcctcaaaaggataatccacctaatggggaggtacgaacactttctggaggcgatgtgtacgcggagtcaccagaagacatgcaagtcccattgtctttatcacaaaaccaacttacccatgaagaaataaggacatatctaagatggtaccactatatatgtttgagaacccatggaaaactagtaagattgaacgacgtgtttaggttcttgaccaattttaatttatcacaaaaagtaaaagatagaattgtggaaattttccgtagctgtaaaaatgcgttaaatattggtcaatttttcgctgttttaagattagtttctagagctattatatatggcatcttacctctaagacgcatgatcttggaaaaggcacctgttcccaaaccacgtcctatcctaagtagtgagaatcacgaagaggtgtacgaggaggtggaagacgatgatagttctgccaaaactggtgatcaaaaggtcgattttgactcatttgcttcattgctgttgactggtaagacaacgagaaaaagagtcaggagaagaatcaaaaatttgaattttaagagtaagaaggttaggttttcagagcatataacatttcaagaccctccaaacctcaatcaagaatcatctaataatagtgaagcaagaaagcaagatcctgatgcagaagatgaagatcaggattctaataatgacagtcctttggatttcacattgcccatggatcaattattaaagaggctatataagcggagaaaaaacagcggattagtttcgagtttgcccagcgaacaacaagaaactgaggaggagaagaaagttttggaggatatgaaggattccttgtcccatttcaaacaaatacagactgttgattctgcctcattgccaatttcatcggtatttttacagaatggcaatactctaccaactagcaatgtgaataacaccactgttccacagcaacttccgttagaacctttgaagccaaccgccacaggttcagctaatcacctggtgcgagaagaatataatcaggggttgcatccaagcaacggtgccatccaaacaggtttacaacctttaaaaccaacagcaacgggctctgcaaattatttgatgcgaagtcatatggaacaacctcagtctatcaaaccttcgagtacaccagaaacagttacaaactctgggggacttcaacctttgaaacctaccgccacaggttctgcaaattacttgatgaaacagcatatctcaccttcagttaataacccagtatcttcgatgtttcaggcgcaatttacgaaccaatcttcatctccacaaagtacaggaccagcatttctgaattctccgaacattactcttcctcaaagcaatcaacagcaaccttaccaagaggttaatccgactcaagcgaaaattgaaccatctaacatatcgcctcaacacacctactctaacaatgttcggattaataatggtaacatcgtatccatgccgaaagtagaaataactggtgcattcccccctcaaaacactcttcctcaacatcagcaatcgcatttgctttctcctcaaaatacgatcccgcagcaccaacggtcgcaattgatatctccacaaaataccttcactcaaaatcagcccattctttctccgcaacatacttattccaataatcaagcaacaatgatatccccccagaatacgtatactaataatcaacagcagccccaacatcttccacctcctccacctccacgcgctcagcagcagcaacaaggggccattgtgccacctcaacatatgtactctaacgtgcaaaagcagaataatttggtgccgacccaaccctcctatacaaattcaccaagcatacaatctccaaattttttgtcacctcagaatgctgctaatagttactttcaatctttactttcttcttcaccatctccaaatcctacgccatcaaatgcgtctactgttaatggcaataacgccagtaatggcataagttcattccaaaatactagtgcggcaatgaacaatactcaatctcatcagacgtatattcagcagcaacaacaacaacaaactcaacaacgaatatatggtggccaactttctcaaatgcaacaacatccggggcaacttcacttaaacaacagtgatatacatagccaacctaacaagcctaattacggaatgctagggcagcaagttcatcaacagcaacagcaacagcagcagcaatttccattcactgcagatgttaatagatccaattcaagcgatattttgggtaacttgcagtcattgcagcagcaagtcgatgctttacaaatccaatataataggagaccatag

SEQ ID NO: 10758 - DNA, 2619 bp, Artificial Sequence
  Description of Artificial Sequence: Synthetic polynucleotide
atgagttttgattggcttaatgttccgggattggacttaagcagcggggaccaagcagaaaagaggccatccaatggattaggaccacccagtgtgtcttttgattttggtataaatactgctgctccacatgattccagcttttgggatcagggaagcagaagtcacagtgatacaactttgtcttacagaaataatcactctaatacagcagctgataatgccactaacgtgagctctcctcaaaaggataatccacctaatggggaggtaagaacactttctggaggcgatgtgtacgcggagtctccagaagacatgcaagtcccattgtctttatctcaaaaccaacttacccatgaagaaataaggacatatttaagatggtaccactatatatgtttgagaacccatggaaaattagtaagattgaacgacgtgtttaggttcttgaccaattttaatttatctcaaaaagtaaaagatagaattgtggaaattttccgtagctgtaaaaatgcgttaaatattggtcaatttttcgctgttttaagattagtttctagagctattatatatggcatcttacctttgagacgcatgatcttggaaaaggcacctgttcccaaaccacgtcctatcttaagtagtgagaatcacgaagaggtgtacgaggaggtggaagacgatgatagttctgccaaaactggtgatcaaaaggtcgattttgactcttttgcttctttgttgttgactggtaagacaacgagaaaaagagtcaggagaagaatcaaaaatttgaattttaagagtaagaaggttaggttttctgagcatataacatttcaagaccctccaaacctcaatcaagaaagctctaataatagtgaagcaagaaagcaagatcctgatgcagaagatgaagatcaggattctaataatgacagtcctttggatttcacattgcccatggatcaattattaaagaggttatataagagaagaaaaaacagcggattagtttctagtttgcccagcgaacaacaagaaactgaggaggagaagaaagttttggaggatatgaaggattccttgtcccatttcaaacaaatacagactgttgattctgcctctttgccaatttcttctgtatttttacagaatggcaatactttaccaactagcaatgtgaataacaccactgttccacagcaacttccgttagaacctttgaagccaaccgccacaggttctgctaatcacttggtgagagaagaatataatcaggggttgcatccaagcaacggtgccatccaaacaggtttacaacctttaaaaccaacagcaacgggctctgcaaattatttgatgagaagtcatatggaacaacctcagtctatcaaaccttctagtacaccagaaacagttacaaactctgggggacttcaacctttgaaacctaccgccacaggttctgcaaattacttgatgaaacagcatatctctccttctgttaataacccagtatcttctatgtttcaggcgcaatttacgaaccaatcttcttctccacaaagtacaggaccagcatttttgaattctccgaacattactcttcctcaaagcaatcaacagcaaccttaccaagaggttaatccgactcaagcgaaaattgaaccatctaacatatctcctcaacacacctactctaacaatgttagaattaataatggtaacatcgtatccatgccgaaagtagaaataactggtgcattcccccctcaaaacactcttcctcaacatcagcaatctcatttgctttctcctcaaaatacgatcccgcagcaccaaagatctcaattgatatctccacaaaataccttcactcaaaatcagcccattctttctccgcaacatacttattccaataatcaagcaacaatgatatccccccagaatacgtatactaataatcaacagcagccccaacatcttccacctcctccacctccacgcgctcagcagcagcaacaaggggccattgtgccacctcaacatatgtactctaacgtgcaaaagcagaataatttggtgccgacccaaccctcctatacaaattctccaagcatacaatctccaaattttttgtctcctcagaatgctgctaatagttactttcaatctttactttcttcttctccatctccaaatcctacgccatccaatgcgtctactgttaatggcaataacgccagtaatggcataagttctttccaaaatactagtgcggcaatgaacaatactcaatctcatcagacgtatattcagcagcaacaacaacaacaaactcaacaaagaatatatggtggccaactttctcaaatgcaacaacatccggggcaacttcacttaaacaacagtgatatacatagccaacctaacaagcctaattacggaatgttggggcagcaagttcatcaacagcaacagcaacagcagcagcaatttccattcactgcagatgttaatagatccaatagtagcgatattttgggtaacttgcagtctttgcagcagcaagtcgatgctttacaaatccaatataataggagaccatga

SEQ ID NO: 10759 - DNA, 3765 bp, Saccharomyces cerevisiae
atgacgaaattgatggttagatctgaatgcatgctgcgaatggtgcggcggcggccgctgcgtgtgcagttttgtgctcgatggttctccacaaagaagaataccgcagaagcacccaggattaatcctgtggggatacagtatttaggtgagtctttgcaaagacaggtatttggtagttgcggtggtaaagatgaggtggagcaaagcgacaaacttatggagttatcgaaaaagtcgctaaaggaccatgggttgtgggggaagaagacgctcatcacggatccaatatcgtttcctctgccgccactacaaggcaggtcgctagatgagcatttccagaagattgggcgtttcaattctgaaccgtacaagagtttttgcgaggacaagttcacggagatggtggcacgaccggcggaatggctgcggaagccaggctgggttaaatacgtacctggaatggcacccgtcgaagtggcatacccagacgaagagctggtggtgtttgatgtagaaacactctataacgtctctgactatccgactttggccacggccttgtcatcgacggcgtggtacctttggtgttcgccgttcatatgtggtggtgatgatcctgctgcactgatacccctaaacacattgaataaagagcaagtaataattggtcacaatgttgcgtatgatagggcacgggttctcgaagaatacaacttcagggactcgaaggcgtttttcctcgacactcaatctctgcatattgcatctttcgggctgtgttcaagacaacgtccgatgttcatgaagaataacaagaaaaaagaggcagaagtggaatcggaagtacatccagaaatttccatagaagattatgacgacccttggttaaatgtgtctgctttaaactcgctaaaggatgtagcgaaatttcactgcaagatagatcttgataagactgatagagatttctttgcttccacagataaatcaacgataatagaaaatttccaaaaactggtcaactactgcgccactgacgtaacggccacaagccaagtgtttgatgagattttccctgttttcctgaaaaagtgtcctcatccagtttcgtttgcaggtttaaagtccttaagcaaatgcattctgccgacgaagctaaacgactggaatgattacttgaacagctctgagtctttgtaccaacagtccaaagtccagatagaatccaaaattgttcaaatcataaaagatatcgtcctgttgaaggacaaaccagatttttatctcaaggatccctggttatcacaattggattggaccaccaaacctttaagattgacaaagaaaggtgttcctgcaaagtgtcaaaagctgcccggctttccagaatggtatagacaactttttccctcaaaggacactgtagaacctaagatcactattaaatcaagaataattccgattttgttcaagttatcgtgggagaattcccccgtaatatggtcgaaggagtctggatggtgcttcaacgtgccccatgaacaagtagaaacatacaaggctaaaaattatgttttggcagatagcgtatctcaagaggaagaggaaataagaacgcataacctaggattgcaatgcacaggtgttcttttcaaagtacctcatcccaatgggccgacttttaattgcactaatcttttaaccaaatcgtataaccatttttttgaaaagggcgtactaaaatctgagtcagaattggctcatcaggctttacaaattaactcttcagggtcttattggatgtcagcaagggaaagaatccaatcccaatttgtagtccccagttgtaaattccctaatgagttccagtctttgtccgcaaaatcgtcgttaaataatgagaagacaaatgatcttgccataattataccgaaaatcgtccccatgggcacaatcactagaagagctgtggaaaatgcgtggttaaccgcatccaatgcaaaagcaaataggataggttccgaattgaaaactcaagtcaaagctcctccaggttattgttttgttggggcggacgtggatagtgaggaattgtggatagcatctttagtcggtgactccattttcaatgttcatggtggtaccgccattggttggatgtgtttagaaggcactaaaaacgaaggtacagatttgcacacgaagactgctcaaattttggggtgttctcgtaatgaggcgaaaatttttaattatggtagaatttacggcgctggtgctaaatttgcgagtcagttacttaaaaggtttaacccatctctaactgatgaagagacaaaaaaaattgcgaataagttatatgaaaatacgaaaggtaaaacgaaaagatcaaaattattcaaaaaattttggtatggtggatctgagtcaattctattcaataaattagaaagcatcgcggaacaagaaactccaaagacaccggtactgggatgtggtattacctattcacttatgaagaaaaatctgagggcgaattcctttctaccttcaagaatcaattgggccatccagtcatctggagtggattatctacatcttctttgttgctccatggaatatattattaagaaatataaccttgaggcaaggctttgcatttccatccatgatgagattagatttttggtgagcgaaaaggacaaatacagagctgctatggctttgcaaatcagcaacatatggacgagagcaatgttttgccagcaaatggggataaatgaattaccgcaaaactgtgcctttttctcgcaagtagatattgattctgtcatacgtaaagaagtcaatatggactgcataaccccctcgaacaaaaccgccattcctcatggggaggcgcttgatatcaatcaactgctagacaaatccaatagtaaattgggtaaaccaaatctcgatatcgacagcaaagtatcacaatatgcctataactacagagaacctgtatttgaagaatataataaatcttatactccagagttcttaaaatattttcttgcgatgcaagtccagtcagataagcgcgatgtgaatcggctagaagatgagtatctgcgggagtgtacatccaaagaatacgctagagatgggaacactgcagagtacagcctcctagactatataaaggatgtcgagaagggcaaaaggactaaagtacgtattatgggatccaattttttagatggtaccaaaaatgccaaagctgatcaacgaatcagattacctgtcaatatgccagattatcccacacttcataaaattgctaacgattcagcaatcccagaaaagcaattgctggagaacaggagaaagaaggaaaacaggatagatgacgaaaataagaaaaaattaaccagaaaaaagaataccacgcctatggaaaggaagtacaaaagagtgtatggtggcaggaaggcatttgaagcgttctatgaatgtgcaaataaaccgttagactatactttggagacagaaaaacaattctttaatattcctatagatggagtgattgacgacgttctgaacgacaaatctaattataaaaagaaaccatcacaagcaagaacggcatcatcatcgccaataagaaagactgcgaaagcagtacattccaaaaaattgccggcaaggaagtcaagcactacaaatagaaatttggttgagctggaaagggacattactatttctagagagtactag

SEQ ID NO: 10760 - DNA, 3765 bp, Artificial Sequence
  Description of Artificial Sequence: Synthetic polynucleotide
atgacgaaattgatggttagatctgaatgcatgttaagaatggtgcgccgtaggccgttacgtgtgcagttttgtgctagatggttctccacaaagaagaataccgcagaagcacccaggattaatcctgtggggatacagtatttaggtgagtctttgcaaagacaggtatttggtagttgcggtggtaaagatgaggtggagcaaagcgacaaacttatggagttatccaaaaagtctttgaaggaccatgggttgtgggggaagaagacgctcatcacggatccaatatcctttcctttgccgccattgcaaggcaggtccttggatgagcatttccagaagattgggcgtttcaattctgaaccgtacaagagtttttgcgaggacaagttcacggagatggtggcaagaccggcggaatggttaagaaagccaggctgggttaaatacgtacctggaatggcacccgtcgaagtggcatacccagacgaagagttggtggtgtttgatgtagaaacactctataacgtctctgactatccgactttggccacggccttgtcttctacggcgtggtacctttggtgttctccgttcatatgtggtggtgatgatcctgctgcattaatacccttaaacacattgaataaagagcaagtaataattggtcacaatgttgcgtatgatagggcaagagttctcgaagaatacaacttcagggactccaaggcgtttttcctcgacactcaatctttgcatattgcatctttcgggctttgttccagacaacgtccgatgttcatgaagaataacaagaaaaaagaggcagaagtggaaagtgaagtacatccagaaatttccatagaagattatgacgacccttggttaaatgtgtctgctttaaactctttgaaggatgtagcgaaatttcactgcaagatagatcttgataagactgatagagatttctttgcttccacagataaatctacgataatagaaaatttccaaaaattggtcaactactgcgccactgacgtaacggccacaagccaagtgtttgatgagattttccctgttttcttgaaaaagtgtcctcatccagtttcttttgcaggtttaaagtccttaagcaaatgcattttaccgacgaagttgaacgactggaatgattacttgaacagctctgagtctttgtaccaacagtccaaagtccagatagaatccaaaattgttcaaatcataaaagatatcgtcttattgaaggacaaaccagatttttatctcaaggatccctggttatctcaattggattggaccaccaaacctttaagattgacaaagaaaggtgttcctgcaaagtgtcaaaagttgcccggctttccagaatggtatagacaactttttccctccaaggacactgtagaacctaagatcactattaaatctagaataattccgattttgttcaagttatcttgggagaattcccccgtaatatggtccaaggagtctggatggtgcttcaacgtgccccatgaacaagtagaaacatacaaggctaaaaattatgttttggcagatagcgtatctcaagaggaagaggaaataagaacgcataacttgggattgcaatgcacaggtgttcttttcaaagtacctcatcccaatgggccgacttttaattgcactaatcttttaaccaaaagttataaccatttttttgaaaagggcgtattgaaatctgagagtgaattggctcatcaggctttacaaattaactcttctgggtcttattggatgtctgcaagggaaagaatccaatcccaatttgtagtccccagttgtaaattccctaatgagttccagtctttgtccgcaaaaagctctttaaataatgagaagacaaatgatcttgccataattataccgaaaatcgtccccatgggcacaatcactagaagagctgtggaaaatgcgtggttaaccgcatccaatgcaaaagcaaataggataggttccgaattgaaaactcaagtcaaagctcctccaggttattgttttgttggggcggacgtggatagtgaggaattgtggatagcatctttagtcggtgactccattttcaatgttcatggtggtaccgccattggttggatgtgtttagaaggcactaaaaacgaaggtacagatttgcacacgaagactgctcaaattttggggtgttctcgtaatgaggcgaaaatttttaattatggtagaatttacggcgctggtgctaaatttgcgagtcagttacttaaaaggtttaacccatctttgactgatgaagagacaaaaaaaattgcgaataagttatatgaaaatacgaaaggtaaaacgaaaagaagtaaattattcaaaaaattttggtatggtggatctgagtctattcttttcaataaattagaaagcatcgcggaacaagaaactccaaagacaccggtattgggatgtggtattacctattctcttatgaagaaaaatttaagggcgaattcctttttaccttccagaatcaattgggccatccagtcttctggagtggattatttgcatcttctttgttgctccatggaatatattattaagaaatataaccttgaggcaaggctttgcatttccatccatgatgagattagatttttggtgagcgaaaaggacaaatacagagctgctatggctttgcaaatcagcaacatatggacgagagcaatgttttgccagcaaatggggataaatgaattaccgcaaaactgtgcctttttctctcaagtagatattgattctgtcatacgtaaagaagtcaatatggactgcataaccccctctaacaaaaccgccattcctcatggggaggcgcttgatatcaatcaattattagacaaatccaatagtaaattgggtaaaccaaatctcgatatcgacagcaaagtatctcaatatgcctataactacagagaacctgtatttgaagaatataataaatcttatactccagagttcttaaaatattttcttgcgatgcaagtccagagcgataagcgcgatgtgaatagattagaagatgagtatcttcgtgagtgtacatccaaagaatacgctagagatgggaacactgcagagtacagcctcttggactatataaaggatgtcgagaagggcaaaaggactaaagtacgtattatgggatccaattttttagatggtaccaaaaatgccaaagctgatcaaagaatcagattacctgtcaatatgccagattatcccacacttcataaaattgctaacgattctgcaatcccagaaaagcaattgttggagaacaggagaaagaaggaaaacaggatagatgacgaaaataagaaaaaattaaccagaaaaaagaataccacgcctatggaaaggaagtacaaaagagtgtatggtggcaggaaggcatttgaagcgttctatgaatgtgcaaataaaccgttagactatactttggagacagaaaaacaattctttaatattcctatagatggagtgattgacgacgttttgaacgacaaatctaattataaaaagaaaccatctcaagcaagaacggcatcttcttctccaataagaaagactgcgaaagcagtacattccaaaaaattgccggcaaggaagagcagcactacaaatagaaatttggttgagttagaaagggacattactatttctagagagtactga

SEQ ID NO: 10761 - DNA, 702 bp, Saccharomyces cerevisiae
atgtcctccgctattactgctttgacaccaaaccaagtgaacgatgaattgaacaagatgcaagctttcatcagaaaggaagctgaagaaaaagcgaaggaaatccaattgaaggctgaccaagagtacgaaatcgagaagaccaacatcgtaagaaatgaaaccaacaacattgacggcaacttcaagagcaagttgaagaaggccatgctttcgcaacagattactaagtcaacgatagcaaacaaaatgaggttgaaggttctttctgctcgtgaacagtcgctagacgggatattcgaggaaaccaaggaaaagttgtcaggaattgccaacaaccgggacgagtacaagcccattttgcaatcattgatcgtggaggcacttttgaagttgttggaacctaaggcgattgtcaaggctcttgaaagagacgtcgatttaatcgagtcgatgaaggacgacattatgcgtgagtatggggaaaaggcccagcgcgcaccattggaagagattgttatctccaatgattacttgaacaaagaccttgtttccggcggtgttgtggtctccaatgcatcagacaagattgaaattaacaacactttggaggaaagattgaaattgttaagtgaagaggcattgcccgccatcagattggaattgtatggtccttccaagacaagaaagttctttgattga

SEQ ID NO: 10762 - DNA, 702 bp, Artificial Sequence
  Description of Artificial Sequence: Synthetic polynucleotide
atgtcctccgctattactgctttgacaccaaaccaagtgaacgatgaattgaacaagatgcaagctttcatcagaaaggaagctgaagaaaaagcgaaggaaatccaattgaaggctgaccaagagtacgaaatcgagaagaccaacatcgtaagaaatgaaaccaacaacattgacggcaacttcaagagcaagttgaagaaggccatgctttctcaacagattactaagtctacgatagcaaacaaaatgaggttgaaggttctttctgctcgtgaacagtccttggacgggatattcgaggaaaccaaggaaaagttgagtggaattgccaacaacagagacgagtacaagcccattttgcaatctttgatcgtggaggcacttttgaagttgttggaacctaaggcgattgtcaaggctcttgaaagagacgtcgatttaatcgagtccatgaaggacgacattatgcgtgagtatggggaaaaggcccagcgcgcaccattggaagagattgttatctccaatgattacttgaacaaagaccttgtttccggcggtgttgtggtctccaatgcaagtgacaagattgaaattaacaacactttggaggaaagattgaaattgttaagtgaagaggcattgcccgccatcagattggaattgtatggtccttccaagacaagaaagttctttgattga

SEQ ID NO: 10763 - DNA, 1413 bp, Saccharomyces cerevisiae
atgaatcggcgtctcctggtacgttctatatcttgtttccaacctttgtcgagaataacttttggaagaccaaacacgccatttcttagaaagtatgctgacacatccactgctgcaaacaccaacagcaccatattgcggaaacagttactatcgttgaagcccatttctgcctctgattcactgttcatttcgtgtacggtattcaattctaagggaaatattatctcaatgtccgagaagtttcctaaatggtcctttttaactgaacattcccttttccccagagacctgaggaaaatagataactcctctattgatattattccaaccatcatgtgtaagccaaactgtattgtcatcaacttattgcatatcaaagctcttatcgaacgagataaggtctacgtcttcgatacaacaaacccttccgccgctgccaaactgagtgtacttatgtatgacttggagtctaagttgtcctccaccaagaataactctcaattttacgagcatagagccctcgagagtattttcatcaacgtaatgagcgcactggaaacagatttcaagcttcactcacaaatctgtattcaaatcttaaatgatctggaaaacgaggtcaatagacttaaactgcggcatcttttaattaagtccaaagatcttacgcttttttaccaaaaaactttattgattagagatctattagatgaactattagaaaacgacgatgatttagcaaacatgtacttgacagttaagaagtctcctaaggacaatttttcggacttggaaatgcttatagagacgtactacacccaatgtgatgaatacgttcagcaatcagaatctttgattcaggatatcaaatctactgaagaaattgtcaacatcatattggacgcaaatagaaattccttaatgttgttggagttgaaagttaccatctacacgttgggattcacagtagcatctgttctgccggcattctatggtatgaatttaaagaatttcatcgaggagagtgaatgggggtttacttcagtggcggtattttctattgtttctgccctttatatcaccaagaaaaattttaattctttaagatccgtgacaaagatgaccatgtatccaaactcacccgcaaactccagtgtgtatcctaaaacatcagcgtctattgccctgacaaataaactaaagcgaaggcggaagtggtggaaatcaaccaagcagcggttgggagtgctactttatggcagcagctacactaataaggctaacctgtcgaataataagattaataaaggtttttcaaaggtgaagaaatttaacatggagaatgatattaagaacaagcagaacagagatatgatttggaaatggttgatagaagacaagaaaaattga

SEQ ID NO: 10764 - DNA, 1413 bp, Artificial Sequence
  Description of Artificial Sequence: Synthetic polynucleotide
atgaatagacgtctcttagtacgttctatatcttgtttccaacctttgtccagaataacttttggaagaccaaacacgccatttcttagaaagtatgctgacacatccactgctgcaaacaccaacagcaccatattgagaaaacagttattatctttgaagcccatttctgcctctgattctttattcattagttgtacggtattcaattctaagggaaatattatctctatgtccgagaagtttcctaaatggtcctttttaactgaacattcccttttccccagagacttgaggaaaatagataactcctctattgatattattccaaccatcatgtgtaagccaaactgtattgtcatcaacttattgcatatcaaagctcttatcgaaagagataaggtctacgtcttcgatacaacaaacccttccgccgctgccaaattaagtgtacttatgtatgacttggagtctaagttgtcctccaccaagaataactctcaattttacgagcatagagccctcgagagtattttcatcaacgtaatgagcgcattggaaacagatttcaagcttcactctcaaatctgtattcaaatcttaaatgatttggaaaacgaggtcaatagacttaaattaagacatcttttaattaagtccaaagatcttacgcttttttaccaaaaaactttattgattagagatttattagatgaattattagaaaacgacgatgatttagcaaacatgtacttgacagttaagaagtctcctaaggacaatttttctgacttggaaatgcttatagagacgtactacacccaatgtgatgaatacgttcagcaaagtgaatctttgattcaggatatcaaatctactgaagaaattgtcaacatcatattggacgcaaatagaaattccttaatgttgttggagttgaaagttaccatctacacgttgggattcacagtagcatctgttttaccggcattctatggtatgaatttaaagaatttcatcgaggagagtgaatgggggtttacttctgtggcggtattttctattgtttctgccctttatatcaccaagaaaaattttaattctttaagatccgtgacaaagatgaccatgtatccaaactctcccgcaaactccagtgtgtatcctaaaacatctgcgtctattgccttaacaaataaattgaagagaaggcgtaagtggtggaaatctaccaagcagcgtttgggagtgttgctttatggcagcagctacactaataaggctaacttatccaataataagattaataaaggtttttccaaggtgaagaaatttaacatggagaatgatattaagaacaagcagaacagagatatgatttggaaatggttgatagaagacaagaaaaattga

SEQ ID NO: 10765 - DNA, 2877 bp, Saccharomyces cerevisiae
atgacgatcggtgataagcaaaaatggaccgctactaatgtccgtaatacctttctagactatttcaaatctaaagaacacaagtttgtcaaatcctctccagtagttccatttgatgatccaactttacttttcgctaatgccggtatgaaccaatacaagcctatctttttaggtactgtcgatccagcttccgatttctacaccttgaaaagggcttacaactctcaaaagtgtatcagagctggtggtaaacacaacgatttagaagatgtcggtaaggattcttatcatcataccttttttgaaatgctgggtaactggtcgtttggcgactatttcaagaaggaagctattacttactcatggactttgttgactgaagtatacggcattccaaaggatagattatacgttacctattttgaaggtgatgaaaagttaggcttggaacctgatactgaagcccgtgaactatggaaaaatgttggtgttcccgatgaccatatattacctggtaatgcaaaggacaacttttgggaaatgggtgaccaaggcccatgtggtccttgttctgaaattcactacgatagaataggtggtagaaatgctgcttccttggttaatatggacgaccctgatgtcttggaagtttggaatttggttttcattcaattcaacagagaacaagacgggtctttgaagcctttacctgccaagcatatcgacacaggtatggggttcgaaagattggtttctgttctgcaagatgttagatctaactatgataccgatgttttcacacctttgttcgagcgtatccaagaaatcacttcagttagaccatattctggcaattttggtgagaatgacaaggacggtatcgatactgcctacagagttttagctgatcatgtccgtacattgacttttgccttagctgacggtggcgttccaaacaatgaaggtagaggatatgttttgagacgcattctaagaagaggtgcccgttacgcccgtaaatacatgaattacccaatcggtaactttttctccactttggctccaactttaatttctcaggttcaagatatctttcccgaattagccaaggatcctgcattcctctttgaaatcttggatgaagaagaagcttctttcgctaagaccttggatcgtggtgaaagactatttgaaaaatatgcttctgctgcttctaagactgaatctaagactttagacggtaaacaagtttggagactttacgacacttatggtttcccagtcgacttgactgaattgatggctgaagaacaaggcttgaagattgatggacccggtttcgaaaaggccaaacaagagtcatacgaagcatccaaaagaggtggtaagaaggaccaaagtgatttgattaagttaaacgtccatgaattatccgagttgaacgatgctaaggtgcccaagactaatgatgaattcaaatacggcagcgccaacgtcgaaggtaccattttgaaactgcatgacggtaccaactttgttgatgagatcactgaaccaggtaagaagtacggtattattttggataaaacatgtttctacgccgaacaaggtggtcaagaatatgacactggtaaaattgttattgatgacgctgctgagtttaatgttgaaaatgttcaattgtataacggttttgttttccacaccgggtctttagaagaaggtaagttgtctgtcggtgacaagattatcgcttcattcgatgaactacgtcgtttccctattaagaacaatcatactggtacacatatcttaaactttgctctgaaggaaactttgggtaatgatgtcgatcaaaagggttctttggttgccccagaaaaattgagattcgatttctctcataaaaaggctgtgtcaaatgaagaattgaaaaaagttgaagatatctgtaatgagcaaattaaagaaaacttacaagtgttttacaaggaaattccattggacttggccaaatccattgatggtgttcgtgctgtctttggtgagacttacccagatccagttcgtgtagtttctgttggtaagccaatcgaagaattgttggccaacccagctaacgaagagtggaccaagtattctattgaattttgcggtggtacccatgtcaacaagacaggcgatattaaatacttcgtcattttagaagagagcggtattgcaaagggtatcagaagaattgttgctgttactggaactgaagcctttgaagctcaaagattggctgaacagtttgctgctgatttggatgctgcagacaagctgccgttctctccaatcaaagaaaagaagttgaaggaacttggtgtcaaacttggtcaactttcaatttctgttatcacaaaaaatgaactgaagcagaaatttaacaaaattgaaaaagcagtgaaggatgaagttaagtcaagggccaaaaaagaaaacaaacaaactcttgatgaagtgaagacatttttcgaaaccaatgagaatgctccatacctagttaaattcattgatatttctccaaatgctaaagctatcactgaagcgatcaactacatgaaatccaatgattctgtcaaagacaagtcaatctatttattggcaggtaatgaccctgaaggtcgtgttgctcacggttgttacatctccaatgctgctttagccaagggtattgatggttctgcgcttgccaaaaaggtgtccagtatcatcggcggtaaggctggtggtaaaggtaatgttttccaaggtatgggtgataaaccagccgctataaaggatgcagttgatgatttggaaagtttgttcaaggagaagctttccatttaa

SEQ ID NO: 10766 - DNA, 2877 bp, Artificial Sequence
  Description of Artificial Sequence: Synthetic polynucleotide
atgacgatcggtgataagcaaaaatggaccgctactaatgtccgtaatacctttttggactatttcaaatctaaagaacacaagtttgtcaaatcctctccagtagttccatttgatgatccaactttacttttcgctaatgccggtatgaaccaatacaagcctatctttttaggtactgtcgatccagcttccgatttctacaccttgaaaagggcttacaactctcaaaagtgtatcagagctggtggtaaacacaacgatttagaagatgtcggtaaggattcttatcatcataccttttttgaaatgttgggtaactggtcttttggcgactatttcaagaaggaagctattacttactcttggactttgttgactgaagtatacggcattccaaaggatagattatacgttacctattttgaaggtgatgaaaagttaggcttggaacctgatactgaagcccgtgaattatggaaaaatgttggtgttcccgatgaccatatattacctggtaatgcaaaggacaacttttgggaaatgggtgaccaaggcccatgtggtccttgttctgaaattcactacgatagaataggtggtagaaatgctgcttccttggttaatatggacgaccctgatgtcttggaagtttggaatttggttttcattcaattcaacagagaacaagacgggtctttgaagcctttacctgccaagcatatcgacacaggtatggggttcgaaagattggtttctgttttgcaagatgttagatctaactatgataccgatgttttcacacctttgttcgagcgtatccaagaaatcacttctgttagaccatattctggcaattttggtgagaatgacaaggacggtatcgatactgcctacagagttttagctgatcatgtccgtacattgacttttgccttagctgacggtggcgttccaaacaatgaaggtagaggatatgttttgagacgcattttaagaagaggtgcccgttacgcccgtaaatacatgaattacccaatcggtaactttttctccactttggctccaactttaatttctcaggttcaagatatctttcccgaattagccaaggatcctgcattcctctttgaaatcttggatgaagaagaagcttctttcgctaagaccttggatcgtggtgaaagattatttgaaaaatatgcttctgctgcttctaagactgaatctaagactttagacggtaaacaagtttggagactttacgacacttatggtttcccagtcgacttgactgaattgatggctgaagaacaaggcttgaagattgatggacccggtttcgaaaaggccaaacaagagagttacgaagcatccaaaagaggtggtaagaaggaccaaagtgatttgattaagttaaacgtccatgaattatccgagttgaacgatgctaaggtgcccaagactaatgatgaattcaaatacggcagcgccaacgtcgaaggtaccattttgaaattgcatgacggtaccaactttgttgatgagatcactgaaccaggtaagaagtacggtattattttggataaaacatgtttctacgccgaacaaggtggtcaagaatatgacactggtaaaattgttattgatgacgctgctgagtttaatgttgaaaatgttcaattgtataacggttttgttttccacaccgggtctttagaagaaggtaagttgtctgtcggtgacaagattatcgcttctttcgatgaattgcgtcgtttccctattaagaacaatcatactggtacacatatcttaaactttgctttgaaggaaactttgggtaatgatgtcgatcaaaagggttctttggttgccccagaaaaattgagattcgatttctctcataaaaaggctgtgagtaatgaagaattgaaaaaagttgaagatatctgtaatgagcaaattaaagaaaacttacaagtgttttacaaggaaattccattggacttggccaaatccattgatggtgttcgtgctgtctttggtgagacttacccagatccagttcgtgtagtttctgttggtaagccaatcgaagaattgttggccaacccagctaacgaagagtggaccaagtattctattgaattttgcggtggtacccatgtcaacaagacaggcgatattaaatacttcgtcattttagaagagagcggtattgcaaagggtatcagaagaattgttgctgttactggaactgaagcctttgaagctcaaagattggctgaacagtttgctgctgatttggatgctgcagacaagttaccgttctctccaatcaaagaaaagaagttgaaggaacttggtgtcaaacttggtcaactttctatttctgttatcacaaaaaatgaattgaagcagaaatttaacaaaattgaaaaagcagtgaaggatgaagttaagtccagggccaaaaaagaaaacaaacaaactcttgatgaagtgaagacatttttcgaaaccaatgagaatgctccatacttggttaaattcattgatatttctccaaatgctaaagctatcactgaagcgatcaactacatgaaatccaatgattctgtcaaagacaagtctatctatttattggcaggtaatgaccctgaaggtcgtgttgctcacggttgttacatctccaatgctgctttagccaagggtattgatggttctgcgcttgccaaaaaggtgtccagtatcatcggcggtaaggctggtggtaaaggtaatgttttccaaggtatgggtgataaaccagccgctataaaggatgcagttgatgatttggaaagtttgttcaaggagaagctttccatttga

SEQ ID NO: 10767 - DNA, 4098 bp, Saccharomyces cerevisiae
atgagactacttgcgttggtattgttattgttgtgtgcgccgcttcgtgcatggacttatagcttacgatatggcatacccgaatctgctcaggtctggtctattttagttcatttactgggcgatgttgataatcagctgttaactaatttatatcctttggttaccggtttggatgacgagattgatattcaagaaaatcttgtggcgctaacttccaatgtattaagggagcgatacgataaagaggatgtggctgatttattggaactgtatgctagtctttaccctatgggtatgatacagcacgatatcagttccaatgcagaacaagacgatgcaaatagtagctatttcgttttgaatggtaataggtacgaaaagcccgacgacgtgttctacttgaaatctaaggatttaacaattcaacagaaagtcccagatgttgatgttatacaaccttacgatgttgtcattggtactaactcagaagcgccgatattgatcttgtacggttgtcctaccgttattgactccgacttcgaagaattcaataggaatttatttatggaagcaatgaatggagagggaaaatttagatttatttggagatccacatgttcccttgatgggaaaagcgtggagtatcccttaactcatccgcttgaaattactttacaaaatggttctagaatgagctccatacctcaattaaaaaaaatactatatactgtacccaaagaaatattggttggagcagacaacgatgatcagctccatgatctagaaccagaagaattacgtgaacttgatttgagagtaacatcgttaatctcagaattttaccaatataaaaaggatatcacagccactctaaatttcaccaaaagtattgttaacaactttccactaatctctaaacaactgattaaggtttcatctgttaacaaggatataataacaagtaatgaagaactcaatagtaaaggcttcgattacaacatgctaggtctctatattaatggacagaattggaaaattacctcactgactccgtacaatttgcttactgctttaaaaactgaataccaaagtttactgaaaattacgaaccttttgcaagaactcgagccatcgaaatgcatactagattccaagtttttactcaataagttttctcaattttcattggggaagttgcaaaacttacaaccaatcaaaatggatctccacacaattccagggttctcagaatcagtaatatacttcaatgatatcgaaagcgacccgcaatatgacgaattagtaaatagtgttcaagcattttttgataaatcgaaattcggagagttgcctgaaataaagcaaaactggtcagagatcatattcgttatagatttcgcccgtttagaagatagtgaggtgaaggaggcattgggtgggttggttcgtgccgttaatgttgtctcccagggatatccgcaaagagtcggactattgccatttagttcagatagtgacaagtccgttgttaataaaatttacgagctgaagaactcaactgacaatttaacagaattaaaaagttttttggagacaatgctgcttgcagatggcctttccgcgaatgcaaaacattcaaaacacataccagttccagatgttttccatctacttgatgaacttcaaattgacgaaacatcaattataatcaatggagagatttacccatttagaaaaaatgcttggaattatttaattgcaaaagttatcaaaaaggacactgaatttattcgtaaagaattgagcaattcttctccgaaaaacaaacaaattagcgtaagggacttattgcattacaaatctgcaaatctgagacataataaatatacaccaaattattttgctgattcggtatattcttcggtcaacaatactgcattggaaagcgtatgctcagaaagaataggctactatactaaaaatgaagaatacaatttattacacacaatcacattagtggatgattttggctctattcatgctttgaaaagattgagaaacttgttgcatacttcctttgttggtgttaggatcagaatcattcacgtaggtgatatttctgatatttggtatcaattgcgtggaagtctttcccaaaaagatccaataggctcaataaatacatttattgatgctttgaaacttaaaaaggtaaaaagtcacacgtacaaaaaaagcggcttaaaccagttaggccttcataaatggcttcctgacattccattatttgaattgcaaaagggttcatttattgctttgaacggtagatttattcatcttgatcaaaatgaagtgccagaaacagaacatttcgaagcaatcataaagagagaagctctaagaacgatcgattcagttttcgccctagatttactttttccaggtttctcacaggaaataatcaatcctgatttgatagaaatgatctcctccattttaactaggttgttttaccaaggtacacatatatacaataatggtattgattataccactgaaagtagcttaccaagaatggatttgagcgagttttttagacctaataatttaacgatgtttgaagatggaaaatcagcttctattgatttactactaattttagatccacttgaagagagaacgcaaatgattctttctcttgttgagcaattcaggcctttgaaatttgttaatattcaggtaattttaatgccgacactggaattaaacattgtccctattagaagaatatacgttgatgacgcagatattgtcaaatcaataacttctgaggatagcagatcagatccagaagtagatattgaaatggatgttcctaattctttcattgtagataataattatcggataaaaaaattgctcatagaattacattccttctctagcaaaacagtcctttcaactggcaatattgatggtatggggggtgtatgcctagcacttgtcgattctgcagggaacattattgacaaaactacaacaatgaaaacctttggctatggacaatttcataccgacaaatttttaaagggttgctatataaaaagttgtgattcaagatataccgttcagtcattttctactgacgggcatcccgactttataccatcagattccttggatatactgtcgtacaatccacaaaaaatcgctgtaaaaatttcagaagagcctacacacgaggaagaatacgaggaaggtcgcaacaatgatacaataatcaatatttttactattttagagtccgggccagatgaggaagagaggtacatgcaaatgattttatccattttgtcaaagtgtcccgaaacgcaaaaggtgaattttttcattttagatcagccgtttatctccgacactttaaggaaatcatgtgagtatataaattcctctgatgaaatgagaggcaatgtcatttttttgaattatgaatggcctcaatggttaagaccgcaaagattttcttcaaggagaagggatgtctctagatttctgttcttggatgtccttttacctcaaaacatctccaaagtgttatatatgagtccaactgaagtaccgctggatccttttgacatttttcaatttcaaggcctcaaacgtgcacctctaggactattccgaatgagtggtgatggttattggaaagaaggatactgggaaaaaatgttaagggagaataatttagaattttattctaccgaaccggcctttttagtaaacttagagaggtttcgggagttagatgctggtgataaatacaggattcactatcaacgtatttctacagacgccatgtctcttgtcaatatcggccaagatctagttaacaacctacaactcgaggttccgattaggtttctcaagggatcgtataagaagaaattagttattaatgatgaatgtgtttctgaatggaagaaaaaaataaataagttcgcatcctctcctggcgatgaagacgtacctggagaaagtgttagcagcaaataccaagattccgacaatgccgctcctctgcatgacgaattataa

SEQ ID NO: 10768 - DNA, 4098 bp, Artificial Sequence
  Description of Artificial Sequence: Synthetic polynucleotide
atgagattacttgcgttggtattgttattgttgtgtgcgccgcttcgtgcatggacttatagcttaagatatggcatacccgaatctgctcaggtctggtctattttagttcatttattaggcgatgttgataatcagcttttaactaatttatatcctttggttaccggtttggatgacgagattgatattcaagaaaatcttgtggcgttgacttccaatgtattaagggagagatacgataaagaggatgtggctgatttattggaattgtatgctagtctttaccctatgggtatgatacagcacgatatcagttccaatgcagaacaagacgatgcaaatagtagctatttcgttttgaatggtaataggtacgaaaagcccgacgacgtgttctacttgaaatctaaggatttaacaattcaacagaaagtcccagatgttgatgttatacaaccttacgatgttgtcattggtactaactctgaagcgccgatattgatcttgtacggttgtcctaccgttattgactccgacttcgaagaattcaataggaatttatttatggaagcaatgaatggagagggaaaatttagatttatttggagatccacatgttcccttgatgggaaaagcgtggagtatcccttaactcatccgcttgaaattactttacaaaatggttctagaatgagctccatacctcaattaaaaaaaatactttatactgtacccaaagaaatattggttggagcagacaacgatgatcagctccatgatttggaaccagaagaattacgtgaacttgatttgagagtaacaagtttaatcagtgaattttaccaatataaaaaggatatcacagccactttgaatttcaccaaaagtattgttaacaactttccattgatctctaaacaattgattaaggtttcttctgttaacaaggatataataacaagtaatgaagaactcaatagtaaaggcttcgattacaacatgttgggtctctatattaatggacagaattggaaaattacctccttgactccgtacaatttgcttactgctttaaaaactgaataccaaagtttattgaaaattacgaaccttttgcaagaactcgagccatctaaatgcatattggattccaagtttttactcaataagttttctcaattttctttggggaagttgcaaaacttacaaccaatcaaaatggatctccacacaattccagggttctctgaaagtgtaatatacttcaatgatatcgaaagcgacccgcaatatgacgaattagtaaatagtgttcaagcattttttgataaatctaaattcggagagttgcctgaaataaagcaaaactggtctgagatcatattcgttatagatttcgcccgtttagaagatagtgaggtgaaggaggcattgggtgggttggttcgtgccgttaatgttgtctcccagggatatccgcaaagagtcggattattgccatttagttctgatagtgacaagtccgttgttaataaaatttacgagttgaagaactctactgacaatttaacagaattaaaaagttttttggagacaatgttacttgcagatggcctttccgcgaatgcaaaacattctaaacacataccagttccagatgttttccatttgcttgatgaacttcaaattgacgaaacatccattataatcaatggagagatttacccatttagaaaaaatgcttggaattatttaattgcaaaagttatcaaaaaggacactgaatttattcgtaaagaattgagcaattcttctccgaaaaacaaacaaattagcgtaagggacttattgcattacaaatctgcaaatttaagacataataaatatacaccaaattattttgctgattctgtatattcttctgtcaacaatactgcattggaaagcgtatgcagtgaaagaataggctactatactaaaaatgaagaatacaatttattacacacaatcacattagtggatgattttggctctattcatgctttgaaaagattgagaaacttgttgcatacttcctttgttggtgttaggatcagaatcattcacgtaggtgatatttctgatatttggtatcaattgcgtggaagtctttcccaaaaagatccaataggctctataaatacatttattgatgctttgaaacttaaaaaggtaaaaagtcacacgtacaaaaaaagcggcttaaaccagttaggccttcataaatggcttcctgacattccattatttgaattgcaaaagggttcttttattgctttgaacggtagatttattcatcttgatcaaaatgaagtgccagaaacagaacatttcgaagcaatcataaagagagaagctttgagaacgatcgattctgttttcgccttggatttactttttccaggtttctctcaggaaataatcaatcctgatttgatagaaatgatctcctccattttaactaggttgttttaccaaggtacacatatatacaataatggtattgattataccactgaaagtagcttaccaagaatggatttgagcgagttttttagacctaataatttaacgatgtttgaagatggaaaatctgcttctattgatttattattgattttagatccacttgaagagagaacgcaaatgattctttctcttgttgagcaattcaggcctttgaaatttgttaatattcaggtaattttaatgccgacattagaattaaacattgtccctattagaagaatatacgttgatgacgcagatattgtcaaatctataacttctgaggatagcagaagtgatccagaagtagatattgaaatggatgttcctaattctttcattgtagataataattatagaataaaaaaattgctcatagaattacattccttctctagcaaaacagtcctttctactggcaatattgatggtatggggggtgtatgcttggcacttgtcgattctgcagggaacattattgacaaaactacaacaatgaaaacctttggctatggacaatttcataccgacaaatttttaaagggttgctatataaaaagttgtgattccagatataccgttcagtctttttctactgacgggcatcccgactttataccaagtgattccttggatatattatcttacaatccacaaaaaatcgctgtaaaaatttctgaagagcctacacacgaggaagaatacgaggaaggtcgcaacaatgatacaataatcaatatttttactattttagagtccgggccagatgaggaagagaggtacatgcaaatgattttatccattttgtccaagtgtcccgaaacgcaaaaggtgaattttttcattttagatcagccgtttatctccgacactttaaggaaaagttgtgagtatataaattcctctgatgaaatgagaggcaatgtcatttttttgaattatgaatggcctcaatggttaagaccgcaaagattttcttccaggagaagggatgtctctagatttcttttcttggatgtccttttacctcaaaacatctccaaagtgttatatatgagtccaactgaagtaccgttagatccttttgacatttttcaatttcaaggcctcaaacgtgcacctttgggattattccgcatgagtggtgatggttattggaaagaaggatactgggaaaaaatgttaagggagaataatttagaattttattctaccgaaccggcctttttagtaaacttagagaggtttagagagttagatgctggtgataaatacaggattcactatcaacgtatttctacagacgccatgtctcttgtcaatatcggccaagatttggttaacaacttacaactcgaggttccgattaggtttctcaagggatcctataagaagaaattagttattaatgatgaatgtgtttctgaatggaagaaaaaaataaataagttcgcatcctctcctggcgatgaagacgtacctggagaaagtgttagcagcaaataccaagattccgacaatgccgctcctttgcatgacgaattatga

SEQ ID NO: 10769 - DNA, 2280 bp, Saccharomyces cerevisiae
atgacagcgccattgtggccaaacaagaatgaaaaaaaccacacagttaaaagagcgttatcaacggatatgaccagcaatattttgagtagcacaaacgcgagctcaaacgaagaaaattctaggagttcttctgcagccaatgtacgctccggaacaggtgcaaatacacttactaatggcggcagtactagaaagagacttgcgtgcactaattgtagaaatagaaggaaaaaatgtgatttaggatttccctgtggtaactgttccaggttggaattggtttgtaatgttaatgacgaggacttaagaaagaagcggtacactaataaatatgtcaagtctttggagagccatattgctcaactggagaccaacttaaaaaacctagttcagaagatctaccctgacgatgagcaaatactgaaccgaatgatggtaggtgatgtattatcagctctaccagacagttcacaagtctcaatcaattatactgaccaaactccctctcttccaattcccgcaaccagaggtacattcattattgaaaacgataaggtcagtcaacctctatcgtcctttaaccaacaaacagagccatctactctaaactcgggtatcttcaacacccaaaaacaaaatttcgaagaatcccttgatgatcagttacttttacgaagatcgttaacaccgcaaggtgaaaaaaagaagaaaccgttggtaaaaggtagtctttatcctgaaggacctgtcagttacaaacggaagcaccccgtaaaatcggacagtttattgcctgtgtcttcgttaacagctgctacagacccatctactttttctgacggtataactgctggtaattccgtcctagttaatggtgaactgaaaaaacgtatatccgacttgaagaccaccgtaatagtaagaggactaaacgatgataatcccaactctatcaataacgatcccaggattttaaaatctctttccaatttctataagtggctgtatccaggttattttatttttgttcacagagaaagttttctttatggattcttcaatcactccaagaataactatgaagactcaagttactgttctgtcgaattgatatatgccatgtgcgctgtcggttcgaggcttacaccggatctacaagaatattcagaagtgtattatcaacgaagtaagaagactttattacagctcgtctttgatgagcaaagtacagcccgtatcaccaccgtccaagcgctattttgcttagccttttacgaactggggaagggtaataatcaattagggtggtacttctcgggcctggctatcagggtcggctacgacatgggatttcaactggaccctaaagtctggtacgttgatgataacaatctgcagctgacccaaagtgagttggaaataagatcaaggatttactggggttgctatatagcggatcattttatttgcctgatgttgggtagaacgtccacattaagcgttagtaactcaaccatgccagagtcggatgagctgccagaagtcaacggcaccgaagagttcagatttattggaagacatgttttacagatatccttgcctctgaaaaacttgataattctatcaaggcttgtacaaatcttcacctctaaaattttcatcgagtcggaagatatagcacgaaaactaaagtacttgaacactttcaattctcaggtttacaactggagacaatctctaccggaatttttgcaatggtcgaaaacactcatcgagaacgatgacgtatccacagaccccactatatcttacttctggtattgctactacatagtgcggctcacctttaacaagccatttatagaagactctcaagaatccgaaacggtagtcatagagatcatcgatgatttgaagactttgctggacaatttcgggaaaaaattcggaaactacacgaagggaaacctttaccaactttactcatgcctgttggccatcaactgtttgaagaagttgaaagagatacgttccagtgagcaagactcatggaatgcacaattggattttttcaatcacatcttctacacacaactatatcccgcatatgatctgccgaaaaagctgcaggaggatacggagctggaaacagaacaagaaaaccagatgttgaaccaagttggaaatataaactacacgcacgatttttcactctcccacgaaattgacgatcttatcagagaactgtttggggtgggcacacctcaaaaactctga

SEQ ID NO: 10770 - DNA, 2280 bp, Artificial Sequence
  Description of Artificial Sequence: Synthetic polynucleotide
atgacagcgccattgtggccaaacaagaatgaaaaaaaccacacagttaaaagagcgttatctacggatatgaccagcaatattttgagtagcacaaacgcgagcagtaacgaagaaaattctaggagttcttctgcagccaatgtacgctccggaacaggtgcaaatacacttactaatggcggcagtactagaaagagacttgcgtgcactaattgtagaaatagaaggaaaaaatgtgatttaggatttccctgtggtaactgttccaggttggaattggtttgtaatgttaatgacgaggacttaagaaagaagagatacactaataaatatgtcaagtctttggagagccatattgctcaattggagaccaacttaaaaaacttggttcagaagatctaccctgacgatgagcaaatattaaacagaatgatggtaggtgatgtattatctgctttgccagacagttctcaagtctccatcaattatactgaccaaactccctctcttccaattcccgcaaccagaggtacattcattattgaaaacgataaggtcagtcaacctttatcttcctttaaccaacaaacagagccatctactttgaacagtggtatcttcaacacccaaaaacaaaatttcgaagaatcccttgatgatcagttacttttaagaagatctttaacaccgcaaggtgaaaaaaagaagaaaccgttggtaaaaggtagtctttatcctgaaggacctgtcagttacaaaagaaagcaccccgtaaaaagtgacagtttattgcctgtgtcttctttaacagctgctacagacccatctactttttctgacggtataactgctggtaattccgtcttggttaatggtgaattgaaaaaacgtatatccgacttgaagaccaccgtaatagtaagaggattgaacgatgataatcccaactctatcaataacgatcccaggattttaaaatctctttccaatttctataagtggttatatccaggttattttatttttgttcacagagaaagttttctttatggattcttcaatcactccaagaataactatgaagacagcagttactgttctgtcgaattgatatatgccatgtgcgctgtcggttctaggcttacaccggatttgcaagaatattctgaagtgtattatcaaagaagtaagaagactttattacagctcgtctttgatgagcaaagtacagcccgtatcaccaccgtccaagcgttattttgcttagccttttacgaattggggaagggtaataatcaattagggtggtacttcagtggcttagctatcagggtcggctacgacatgggatttcaattggaccctaaagtctggtacgttgatgataacaatttacagttgacccaaagtgagttggaaataagaagtaggatttactggggttgctatatagcggatcattttatttgcttgatgttgggtagaacgtccacattaagcgttagtaactctaccatgccagagtctgatgagttaccagaagtcaacggcaccgaagagttcagatttattggaagacatgttttacagatatccttgcctttgaaaaacttgataattttatctaggcttgtacaaatcttcacctctaaaattttcatcgagagtgaagatatagcaagaaaattgaagtacttgaacactttcaattctcaggtttacaactggagacaatctttaccggaatttttgcaatggtccaaaacactcatcgagaacgatgacgtatccacagaccccactatatcttacttctggtattgctactacatagtgaggctcacctttaacaagccatttatagaagactctcaagaatccgaaacggtagtcatagagatcatcgatgatttgaagactttgttggacaatttcgggaaaaaattcggaaactacacgaagggaaacctttaccaactttactcttgcttgttggccatcaactgtttgaagaagttgaaagagatacgttccagtgagcaagactcttggaatgcacaattggattttttcaatcacatcttctacacacaattatatcccgcatatgatttaccgaaaaagttacaggaggatacggagttagaaacagaacaagaaaaccagatgttgaaccaagttggaaatataaactacacgcacgatttttctctctcccacgaaattgacgatcttatcagagaattatttggggtgggcacacctcaaaaactctga

SEQ ID NO: 10771 - DNA, 1092 bp, Saccharomyces cerevisiae
atgctagataacatgcaatttcattctccagcaccggaacatcctcaattgaatgggggtattaacaaaattcccgcttcccacaaaataggttacaaattaaaccagcaagtgcagagattggctgtggtcaggaataatattgaagagagattgaactcgatggaatcctcacacggacagatatccgatagtagcgttgtccgtgctatcgatgcaagtatcgatgacttcctaataccttcacctccattatcgccaaagctgaggcaatgccccataataagccagcctcagctggttaatgtggaaagcgaccatagggagctgatcatgttgacccccgtttgggaagcgggcttgaactctcagaagtacaaccataatacaaggaatttcttatcgcaatatagcttcttccgagatatgaaaacaacgaaaaggattcctaacaaagaaaataggaaattgaaagtggtaaaatctgttgtgaactcagaagctctgcccaagagaagaagatacgataggaaaattaagagaagatcaagggagttgtacgaagatgatggaaacaggtcagaaaactatgatgaagaaagtgctcaagaagttccagttagatcagtgactccgatacgtcaagttaaaaggtctcttcatactatttcttcgccattggcctcacagggcgtagtgaataatgtccccaagtatattccaagcatgtcgtgggaaaagttgccggattactcacctcctcttcacactttgccgaatagtaataataaagttttaaaagtggaatggaaaggctctccaatggacttgaatcatgatcctctcaaacagcgtctgcatcctgcagaactagttctcgcacagattctgagacttccatgtgatctttatttggactctaaaagaagatttttcttggaaaaagttcatagattcaaaaaggggttgccgttcaggagaacggatgctcaaaaggcttgtagaatagacgttaataaagcatcaaggctatttgcagcatttgaaaaggtaggttggttacaagataaacattttgaaaagtatttgtaa

SEQ ID NO: 10772 - DNA, 1092 bp, Artificial Sequence
  Description of Artificial Sequence: Synthetic polynucleotide
atgcttgataacatgcaatttcattctccagcaccggaacatcctcaattgaatgggggtattaacaaaattcccgcttcccacaaaataggttacaaattaaaccagcaagtgcagagattggctgtggtcaggaataatattgaagagagattgaactccatggaatcctcccacggacagatatccgatagtagcgttgtccgtgctatcgatgcaagtatcgatgacttcttgataccttctcctccattatctccaaagttaaggcaatgccccataataagccagcctcagttggttaatgtggaaagcgaccatagggagttgatcatgttgacccccgtttgggaagcgggcttgaactctcagaagtacaaccataatacaaggaatttcttatctcaatatagcttcttcagagatatgaaaacaacgaaaaggattcctaacaaagaaaataggaaattgaaagtggtaaaatctgttgtgaactctgaagctcttcccaagagaagaagatacgataggaaaattaagagaagaagtagggagttgtacgaagatgatggaaacaggtctgaaaactatgatgaagaaagtgctcaagaagttccagttagatctgtgactccgatacgtcaagttaaaaggtctcttcatactatttcttctccattggcctctcagggcgtagtgaataatgtccccaagtatattccaagcatgtcttgggaaaagttgccggattactctcctcctcttcacactttgccgaatagtaataataaagttttaaaagtggaatggaaaggctctccaatggacttgaatcatgatcctctcaaacagcgtttgcatcctgcagaattggttctcgcacagattttaagacttccatgtgatctttatttggactctaaaagaagatttttcttggaaaaagttcatagattcaaaaaggggttgccgttcaggagaacggatgctcaaaaggcttgtagaatagacgttaataaagcaagcaggttatttgcagcatttgaaaaggtaggttggttacaagataaacattttgaaaagtatttgtga

SEQ ID NO: 10773 - DNA, 471 bp, Saccharomyces cerevisiae
atggcagtagaagagggtggttgcgtgacgaaacgtttacaaaatgagctgctacagctacttagttctacaacagaaagtattagtgcgtttcccgtagacgataatgatttaacatactgggtagggtatattacaggccctaaagacacaccgtatagtggacttaaattcaaggtttcattgaagtttcctcaaaactatcctttccatccgccaatgattaaatttttgagtccaatgtggcatccaaacgtggataagagtggcaacatttgtttggacattctgaaagagaaatggtctgcagtgtataatgtagaaacaattctattgtcattgcagtcattacttggcgaaccaaataacagatctccgctgaacgctgtggcagcagaactttgggatgcagatatggaggaatacagaaaaaaggtcctggcctgttatgaagaaatcgacgattactga

SEQ ID NO: 10774 - DNA, 471 bp, Artificial Sequence
  Description of Artificial Sequence: Synthetic polynucleotide
atggcagtagaagagggtggttgcgtgacgaaacgtttacaaaatgagttattgcagttacttagttctacaacagaaagtattagtgcgtttcccgtagacgataatgatttaacatactgggtagggtatattacaggccctaaagacacaccgtatagtggacttaaattcaaggtttctttgaagtttcctcaaaactatcctttccatccgccaatgattaaatttttgagtccaatgtggcatccaaacgtggataagagtggcaacatttgtttggacattttgaaagagaaatggtctgcagtgtataatgtagaaacaattttattgtctttgcagtctttacttggcgaaccaaataacagatctccgttgaacgctgtggcagcagaactttgggatgcagatatggaggaatacagaaaaaaggtccttgcctgttatgaagaaatcgacgattactga

SEQ ID NO: 10775 - DNA, 981 bp, Saccharomyces cerevisiae
atgtcacaagtaaaaagagccaatgagaaccgcgaaaccgcaaggttcatcaagaaacacaaaaaacaggttacaaacccaattgatgagaaaaatggaacttccaactgtatagtgcgtgttcccattgctctctatgtttctttggcaccaatgtatttagaaaatcccttgcaaggtgtcatgaagcagcacttgaacccattagtaatgaaatataacaacaaagttggaggtgttgtgctaggttatgaagggttgaaaattcttgatgctgatcctttaagcaaagaagatacatcagaaaaactaataaaaatcacacccgataccccttttggatttacttggtgccatgtaaacctatacgtttggcagccacaagttggagatgttttggaaggttacattttcattcaatccgcctcacacattggtcttttgattcatgatgcgtttaatgctagtatcaaaaagaataatatccctgtggattggacctttgtccataacgacgtggaagaagatgctgacgtgataaacacagatgaaaataatggaaacaataataacgaagataacaaggatagcaatggtggaagcaatagtttgggcaaattttcctttggaaacagatctttgggccactgggtagattctaatggtgaacccattgacggtaaattgaggttcacagtgagaaatgttcatactacaggaagagttgtttctgtggacggtacattaataagtgacgccgacgaagaaggcaatggctataacagctctcgttcccaagctgaaagtttacctatagtttcaaacaaaaaaattgtatttgatgacgaagtttcaatcgaaaacaaagagagccacaaggaactagacttacctgaagtaaaagaagataatggttcagagatcgtatacgaggaaaacaccagtgaaagcaatgatggtgaatcgagtgatagtgattag

SEQ ID NO: 10776 - DNA, 981 bp, Artificial Sequence
  Description of Artificial Sequence: Synthetic polynucleotide
atgtctcaagtaaaaagagccaatgagaaccgcgaaaccgcaaggttcatcaagaaacacaaaaaacaggttacaaacccaattgatgagaaaaatggaacttccaactgtatagtgcgtgttcccattgctctctatgtttctttggcaccaatgtatttagaaaatcccttgcaaggtgtcatgaagcagcacttgaacccattagtaatgaaatataacaacaaagttggaggtgttgtgttgggttatgaagggttgaaaattcttgatgctgatcctttaagcaaagaagatacaagtgaaaaattgataaaaatcacacccgataccccttttggatttacttggtgccatgtaaacctttacgtttggcagccacaagttggagatgttttggaaggttacattttcattcaatccgcctctcacattggtcttttgattcatgatgcgtttaatgctagtatcaaaaagaataatatccctgtggattggacctttgtccataacgacgtggaagaagatgctgacgtgataaacacagatgaaaataatggaaacaataataacgaagataacaaggatagcaatggtggaagcaatagtttgggcaaattttcctttggaaacagatctttgggccactgggtagattctaatggtgaacccattgacggtaaattgaggttcacagtgagaaatgttcatactacaggaagagttgtttctgtggacggtacattaataagtgacgccgacgaagaaggcaatggctataacagctctcgttcccaagctgaaagtttacctatagtttctaacaaaaaaattgtatttgatgacgaagtttccatcgaaaacaaagagagccacaaggaattagacttacctgaagtaaaagaagataatggttctgagatcgtatacgaggaaaacaccagtgaaagcaatgatggtgaaagtagtgatagtgattga

SEQ ID NO: 10777 - DNA, 4995 bp, Saccharomyces cerevisiae
atggatatttctaaaccggttggttctgaaatcacatccgttgatttcgggatcctaacagctaaagagattagaaatctatcagcaaagcaaattaccaatcctacggttttagataacttaggtcatccagtatcaggcggtttatatgacttagccttaggtgcattcttaaggaatctgtgttctacttgtggtttggatgaaaaattctgtccaggtcaccaaggtcacattgaattacctgtcccttgttataatccattgttctttaaccagctatatatttatttgagggcatcatgtttattctgtcatcatttccgtttaaagtcagtagaggttcatcgttacgcatgtaaattgagattgttacaatacggtttgatagacgaatcttacaaactagatgaaataactttgggctctcttaatagcagtatgtacactgacgacgaagctattgaagataatgaggatgaaatggatggtgaaggaagcaagcaatcaaaggatatttcctccactctcttaaatgaactgaaaagtaagcgttcagaatatgttgacatggccatcgctaaagctttgtcagacggcagaactactgagagaggctctttcacagctactgtaaatgatgaacgaaagaaattggtccatgagtttcacaaaaaactattatctagaggtaagtgtgataactgtggtatgttttcgccaaaatttagaaaggatggttttacaaaaatcttcgaaactgcgttgaatgaaaaacaaattacaaataacagagtaaaaggtttcattcgtcaagatatgattaagaagcaaaaacaggctaagaaattggacggttctaacgaagcatctgcaaatgacgaagaaagttttgacgttggtagaaatcctaccaccagaccaaaaaccggctcaacatatattttatctactgaagtgaagaatattctggacactgttttcaggaaggagcaatgtgttttacaatatgtttttcattcgagacccaatttatcaagaaaattggtcaaggctgactctttttttatggatgttcttgttgtgccaccaactagattccgtttgccttccaagcttggtgaagaagttcatgaaaactctcaaaaccaattgttgtccaaggttcttactacgtcattattaattagggacttaaatgatgatttatctaagctacaaaaggacaaagtttctttggaagatagaagggtgatcttcagtaggttaatgaatgcctttgttactattcaaaatgacgtcaatgcttttatcgactctaccaaagcacaaggtagaaccagtggtaaggttccaattcctggtgttaaacaagcactggaaaagaaagaaggtttattcagaaaacatatgatgggtaagcgtgttaactatgccgctcgttctgttatttctccagacccaaatatcgaaactaatgaaattggtgtcccacctgtttttgctgttaaattgacttatccagaaccagtaacggcttataacatagcagagttgcgtcaagctgttattaatggccctgataaatggccaggtgccactcaaatacagaacgaagatggttctttggtctctttgatcggtatgtctgtagagcaacgtaaggcattagctaaccaactattgacaccatcttcaaacgtttctactcatactttgaataaaaaggtttaccgtcacatcaagaacagagatgttgttttaatgaaccgtcaaccgaccttacataaagcctccatgatgggtcacaaagttagggtgttaccaaacgaaaagactttgagattacattatgctaatacaggtgcttataatgcagatttcgatggtgatgaaatgaacatgcattttccacaaaacgaaaatgctagagcagaagcactaaacttagctaatactgattctcaatacttgacaccaacttctggttctccagttagaggtttgattcaagatcatatttctgcgggtgtttggctaacaagtaaggacagttttttcaccagagaacaataccagcaatatatttacggttgcatccgtcctgaggatggtcataccacaagatcgaagatcgttaccttacctccaactatcttcaagccatatccattatggacaggtaaacaaatcatcacaacagttttgttgaatgtcacccctccagatatgcctggtatcaatttaatttctaaaaataagattaaaaacgaatattggggcaagggatctctggaaaacgaagttctcttcaaagacggcgcattgctatgtggtattttagataagtcacaatacggtgcctctaagtatggtattgttcattcattgcatgaagtttatggcccagaagtcgctgctaaagtcttatccgtcttaggtagactatttaccaactatatcactgccacggcattcacttgtggtatggacgatttacgtctaacagcagaaggtaataaatggaggactgacatcttgaagacgtctgttgatacaggtcgtgaagccgctgcagaagttactaatttagataaagacacgccagcagatgacccagagttattaaagaggctacaagaaatactgcgtgataataataagtcaggtattcttgacgctgttacatcctccaaggtcaatgctattacttctcaagtcgtctccaaatgtgttccagatggtactatgaaaaagtttccatgcaattctatgcaagctatggcactttctggtgctaaaggttctaacgttaatgtttctcaaattatgtgtttgttgggtcaacaagctttagaaggtagaagagtgccggtaatggttagtggtaaaactctgccttctttcaaaccttatgaaacagatgccatggctggtggttatgttaagggtcgtttctactctggtataaagccacaggagtattacttccattgtatggctggtcgtgaaggtttaattgatacggccgttaaaacatctagatccggttatttgcaacgttgtctaacaaaacaattagaaggtgttcacgtatcatacgataacagtataagagatgcagatggtacgttagtgcaattcatgtatggtggtgatgccatcgatataaccaaagaatcacacatgactcaattcgagttctgtttagacaattactacgcattattgaagaaatacaacccatcagcactgattgaacatttggatgttgaatcagctttgaagtactctaaaaagactttgaaatacagaaagaagcatagcaaggagcctcattacaaacagtctgtaaaatatgatcctgttttagctaagtataatcctgccaaatacctgggttccgtttctgagaacttccaagataaactagaatctttcttagacaagaactctaaattgttcaaatcatcggatggtgttaacgaaaagaagttcagggccttgatgcaattgaagtatatgcgttctctaattaatccaggtgaagctgttggtattattgcttcacaatctgtcggtgaaccctcaacacagatgacattgaataccttccactttgctggtcacggtgccgctaatgtgacactaggtattcctcgtttaagagaaattgttatgactgcctctgctgccattaaaactccgcaaatgactttgcctatctggaatgatgtttctgatgagcaagctgacactttctgtaagtctatctcaaaagtcctattatccgaagtgatagataaagtgatagtcactgaaactaccggtacttcaaataccgctggtggaaatgcagctcgttcgtatgttatccatatgagattcttcgacaataatgaatacagtgaagaatacgatgtttctaaagaagaattacaaaacgtcatatctaatcaattcatacacttgctagaagctgctattgtaaaagaaatcaaaaaacaaaagagaactacaggaccagacattggtgttgcagtaccaaggctacagacagatgttgcaaatagttcttcgaactctaaaaggttggaagaggataatgatgaagaacaaagtcataagaaaactaaacaagcggtttcgtatgacgagccagatgaagatgaaattgaaactatgagagaagctgaaaagtcttctgacgaagaaggtatcgattccgataaagaaagtgattctgactctgaggacgaagacgttgacatgaatgaacaaattaataagagtattgtggaagctaacaataatatgaacaaagtgcagcgtgatcgtcaatcagcgattatttctcatcatagattcatcaccaaatacaatttcgatgatgaatctggtaaatggtgtgaatttaagctagaattagcagcagacacagaaaagttgttgatggttaatattgttgaagaaatctgtaggaagtctatcattagacagattcctcatattgaccgttgtgttcatccagaacctgaaaacggaaaacgtgtccttgtcacagaaggtgttaatttccaagctatgtgggatcaagaggcatttatcgacgttgatggtattacatctaatgatgttgctgctgtgttgaaaacgtacggtgtagaagctgctagaaatactattgtgaatgaaattaataacgtcttctctcgttatgctatttctgtttctttccgtcatttagaccttattgctgacatgatgaccaggcaaggtacttacttagcctttaacagacagggtatggaaacatccacttcatctttcatgaagatgtcctatgaaactacatgtcaattcttgaccaaggctgttctagataatgagcgtgaacaattggacagtccttccgctagaattgtggtgggtaaattgaacaatgttggtacgggttcatttgatgtgttagcaaaggttccaaatgcggcttag

SEQ ID NO: 10778 - DNA, 4995 bp, Artificial Sequence
  Description of Artificial Sequence: Synthetic polynucleotide
atggatatttctaaaccggttggttctgaaatcacatccgttgatttcgggatcttaacagctaaagagattagaaatttaagtgcaaagcaaattaccaatcctacggttttagataacttaggtcatccagtaagtggcggtttatatgacttagccttaggtgcattcttaaggaatttatgttctacttgtggtttggatgaaaaattctgtccaggtcaccaaggtcacattgaattacctgtcccttgttataatccattgttctttaaccagttatatatttatttgagggcatcttgtttattctgtcatcatttccgtttaaagagtgtagaggttcatcgttacgcatgtaaattgagattgttacaatacggtttgatagacgaatcttacaaattggatgaaataactttgggctctcttaatagcagtatgtacactgacgacgaagctattgaagataatgaggatgaaatggatggtgaaggaagcaagcaatccaaggatatttcctccactctcttaaatgaattgaaaagtaagcgttctgaatatgttgacatggccatcgctaaagctttgagtgacggcagaactactgagagaggctctttcacagctactgtaaatgatgaaagaaagaaattggtccatgagtttcacaaaaaattattatctagaggtaagtgtgataactgtggtatgttttctccaaaatttagaaaggatggttttacaaaaatcttcgaaactgcgttgaatgaaaaacaaattacaaataacagagtaaaaggtttcattcgtcaagatatgattaagaagcaaaaacaggctaagaaattggacggttctaacgaagcatctgcaaatgacgaagaaagttttgacgttggtagaaatcctaccaccagaccaaaaaccggctctacatatattttatctactgaagtgaagaatattttggacactgttttcaggaaggagcaatgtgttttacaatatgtttttcattccagacccaatttatctagaaaattggtcaaggctgactctttttttatggatgttcttgttgtgccaccaactagattccgtttgccttccaagcttggtgaagaagttcatgaaaactctcaaaaccaattgttgtccaaggttcttactacgtctttattaattagggacttaaatgatgatttatctaagttacaaaaggacaaagtttctttggaagatagaagggtgatcttcagtaggttaatgaatgcctttgttactattcaaaatgacgtcaatgcttttatcgactctaccaaagcacaaggtagaaccagtggtaaggttccaattcctggtgttaaacaagcattggaaaagaaagaaggtttattcagaaaacatatgatgggtaagcgtgttaactatgccgctcgttctgttatttctccagacccaaatatcgaaactaatgaaattggtgtcccacctgtttttgctgttaaattgacttatccagaaccagtaacggcttataacatagcagagttgcgtcaagctgttattaatggccctgataaatggccaggtgccactcaaatacagaacgaagatggttctttggtctctttgatcggtatgtctgtagagcaacgtaaggcattagctaaccaattattgacaccatcttccaacgtttctactcatactttgaataaaaaggtttaccgtcacatcaagaacagagatgttgttttaatgaaccgtcaaccgaccttacataaagcctccatgatgggtcacaaagttagggtgttaccaaacgaaaagactttgagattacattatgctaatacaggtgcttataatgcagatttcgatggtgatgaaatgaacatgcattttccacaaaacgaaaatgctagagcagaagcattgaacttagctaatactgattctcaatacttgacaccaacttctggttctccagttagaggtttgattcaagatcatatttctgcgggtgtttggttgacaagtaaggacagttttttcaccagagaacaataccagcaatatatttacggttgcatccgtcctgaggatggtcataccacaagatccaagatcgttaccttacctccaactatcttcaagccatatccattatggacaggtaaacaaatcatcacaacagttttgttgaatgtcacccctccagatatgcctggtatcaatttaatttctaaaaataagattaaaaacgaatattggggcaagggatctttggaaaacgaagttctcttcaaagacggcgcattgttatgtggtattttagataagtctcaatacggtgcctctaagtatggtattgttcattctttgcatgaagtttatggcccagaagtcgctgctaaagtcttatccgtcttaggtagattatttaccaactatatcactgccacggcattcacttgtggtatggacgatttacgtttaacagcagaaggtaataaatggaggactgacatcttgaagacgtctgttgatacaggtcgtgaagccgctgcagaagttactaatttagataaagacacgccagcagatgacccagagttattaaagaggttacaagaaatattacgtgataataataagtctggtattcttgacgctgttacatcctccaaggtcaatgctattacttctcaagtcgtctccaaatgtgttccagatggtactatgaaaaagtttccatgcaattctatgcaagctatggcactttctggtgctaaaggttctaacgttaatgtttctcaaattatgtgtttgttgggtcaacaagctttagaaggtagaagagtgccggtaatggttagtggtaaaactttaccttctttcaaaccttatgaaacagatgccatggctggtggttatgttaagggtcgtttctactctggtataaagccacaggagtattacttccattgtatggctggtcgtgaaggtttaattgatacggccgttaaaacatctagatccggttatttgcaacgttgtttaacaaaacaattagaaggtgttcacgtatcttacgataacagtataagagatgcagatggtacgttagtgcaattcatgtatggtggtgatgccatcgatataaccaaagaatctcacatgactcaattcgagttctgtttagacaattactacgcattattgaagaaatacaacccatctgcattgattgaacatttggatgttgaatctgctttgaagtactctaaaaagactttgaaatacagaaagaagcatagcaaggagcctcattacaaacagtctgtaaaatatgatcctgttttagctaagtataatcctgccaaatacttgggttccgtttctgagaacttccaagataaattagaatctttcttagacaagaactctaaattgttcaaaagcagtgatggtgttaacgaaaagaagttcagggccttgatgcaattgaagtatatgcgttctttgattaatccaggtgaagctgttggtattattgcttctcaatctgtcggtgaaccctccacacagatgacattgaataccttccactttgctggtcacggtgccgctaatgtgacattaggtattcctcgtttaagagaaattgttatgactgcctctgctgccattaaaactccgcaaatgactttgcctatctggaatgatgtttctgatgagcaagctgacactttctgtaagtctatctccaaagtccttttatccgaagtgatagataaagtgatagtcactgaaactaccggtacttccaataccgctggtggaaatgcagctcgttcttatgttatccatatgagattcttcgacaataatgaatacagtgaagaatacgatgtttctaaagaagaattacaaaacgtcatatctaatcaattcatacacttgttggaagctgctattgtaaaagaaatcaaaaaacaaaagagaactacaggaccagacattggtgttgcagtaccaaggttacagacagatgttgcaaatagttcttccaactctaaaaggttggaagaggataatgatgaagaacaaagtcataagaaaactaaacaagcggtttcttatgacgagccagatgaagatgaaattgaaactatgagagaagctgaaaagtcttctgacgaagaaggtatcgattccgataaagaaagtgattctgactctgaggacgaagacgttgacatgaatgaacaaattaataagagtattgtggaagctaacaataatatgaacaaagtgcagcgtgatcgtcaaagtgcgattatttctcatcatagattcatcaccaaatacaatttcgatgatgaatctggtaaatggtgtgaatttaagttggaattagcagcagacacagaaaagttgttgatggttaatattgttgaagaaatctgtaggaagtctatcattagacagattcctcatattgaccgttgtgttcatccagaacctgaaaacggaaaacgtgtccttgtcacagaaggtgttaatttccaagctatgtgggatcaagaggcatttatcgacgttgatggtattacatctaatgatgttgctgctgtgttgaaaacgtacggtgtagaagctgctagaaatactattgtgaatgaaattaataacgtcttctctcgttatgctatttctgtttctttccgtcatttagaccttattgctgacatgatgaccaggcaaggtacttacttagcctttaacagacagggtatggaaacatccacttcttctttcatgaagatgtcctatgaaactacatgtcaattcttgaccaaggctgttttggataatgagcgtgaacaattggacagtccttccgctagaattgtggtgggtaaattgaacaatgttggtacgggttcttttgatgtgttagcaaaggttccaaatgcggcttga

SEQ ID NO: 10779 - DNA, 960 bp, Saccharomyces cerevisiae
atgactattctagaggagcttaatgattcaagcattcctcagaggctagataatcacatatttttcggctccgtacattcactgacgcatacagatttcctagtagaaaataacattaggtttttcataaacgttgatttatcgactgaactaatatcacatatctatcatgaggtccgctcaaagtttgcccatgaaatagtaattgtcaacatcgacaatgactctcaaataccaatagaaagcgatttggtgcgttccttccattggcacaacacttcccttttgcaacaattgatccatcatctcgattttctcagcggtattaataatcacggcgaaccattaactccaccaccagaatctcattacagaaatgcgtatgttcaattcgaccatccaagtgactcagtatcgatattagataaacttttatatggtaataagtcagaatactcgcgtacaaatattttccaagttaccaacgaagcgaagtttcaagtcttcaacgacctaattacaattttcaaatactctatcgctcaaggcgggaataccaatagtaacatacttgttctctcagaaaacggcagcaccgatgaaaatttgataagtttactgatgtctaccgtattgaaagaaaacccaactttcaacgtttaccaggccctccaattcgttaagtctattgcagtaattcctgatacggtaagagatgaaaaaatcttatgggtcacaggatttatcaactatcaagaattaatcaagaaaaatgaaatgtattggggcctaggttcgcaaaagggtcgcaaacttacgtcctttgcgtccccaatatcgaaagtggaaagaaaacaaagaagacgtgacgaccagaatatcatgcgatcaaagctaccacaacagagacaaaaccccttctgctcaacagagagacctaaaagggctcgctgcgattag

SEQ ID NO: 10780 - DNA, 960 bp, Artificial Sequence
  Description of Artificial Sequence: Synthetic polynucleotide
atgactattttagaggagcttaatgattctagcattcctcagaggttagataatcacatatttttcggctccgtacattctttgacgcatacagatttcttagtagaaaataacattaggtttttcataaacgttgatttatctactgaattgatatctcatatctatcatgaggtccgctctaagtttgcccatgaaatagtaattgtcaacatcgacaatgactctcaaataccaatagaaagcgatttggtgcgttccttccattggcacaacacttcccttttgcaacaattgatccatcatctcgattttctcagcggtattaataatcacggcgaaccattaactccaccaccagaatctcattacagaaatgcgtatgttcaattcgaccatccaagtgactctgtatctatattagataaacttttatatggtaataagtctgaatactctcgtacaaatattttccaagttaccaacgaagcgaagtttcaagtcttcaacgacttgattacaattttcaaatactctatcgctcaaggcgggaataccaatagtaacatacttgttctctctgaaaacggcagcaccgatgaaaatttgataagtttattgatgtctaccgtattgaaagaaaacccaactttcaacgtttaccaggccctccaattcgttaagtctattgcagtaattcctgatacggtaagagatgaaaaaatcttatgggtcacaggatttatcaactatcaagaattaatcaagaaaaatgaaatgtattggggcttgggttctcaaaagggtcgcaaacttacgtcctttgcgtccccaatatccaaagtggaaagaaaacaaagaagacgtgacgaccagaatatcatgagatccaagttaccacaacagagacaaaaccccttctgctccacagagagacctaaaagggctcgctgcgattga

SEQ ID NO: 10781 - DNA, 327 bp, Saccharomyces cerevisiae
atggagcatactgcgcatatatttcctattatcatcaagggttccccaccagtaatgtcttctaatccccgacgacaatatcgtttaaatctccggtcaattaagtgcctcaaagaaccccgtgtgcgggtatggcaagcgcagtggcccctggagccagcactatcagcggctaaaatgcctcgagcagcgcacgcccacgcaccccacgcttttgagatccaagcctcagtacctgctggacttcagggcagtgggtatttcgcgccttccgtccgcagcgatctccgtttaccccgctcatttcttttcctaaataagaaatga

SEQ ID NO: 10782 - DNA, 327 bp, Artificial Sequence
  Description of Artificial Sequence: Synthetic polynucleotide
atggagcatactgcgcatatatttcctattatcatcaagggttccccaccagtaatgtcttctaatcccaggagacaatatcgtttaaatctcagatctattaagtgcctcaaagaaccccgtgtgagggtatggcaagcgcagtggcccttggagccagcattatctgcggctaaaatgcctagagcagcgcacgcccacgcaccccacgcttttgagatccaagcctctgtacctgctggacttcagggcagtgggtatttcgcgccttccgtccgcagcgatctccgtttaccccgctcctttcttttcttgaataagaaatga

SEQ ID NO: 10783 - DNA, 876 bp, Saccharomyces cerevisiae
atgaactctattttagacagaaatgttagatctagcgaaactactttaattaaacctgaatctgaatttgataattggttgtcggatgaaaatgacggagctagtcatatcaacgtcaacaaggactcctcgtcagttctttctgcatcttcttccacatggttcgaaccattggaaaacattatctcctctgcatccagctcctcgataggctctccaatcgaagaccagtttatatcttccaacaacgaggaatctgctctttttccaacagatcagtttttcagtaatccttcctcatactcgcattctcccgaggttagcagctcgataaaaagagaagaggatgacaatgccctttcgttggcagattttgaaccggcttctttgcaattaatgcctaacatgataaatactgataataatgacgatagtaccccacttaagaatgaaatcgagctaaacgactcgtttataaaaacaaatctagatgctaaggaaacgaaaaagagggctccaagaaaaagactgacccccttccaaaagcaagctcacaacaagattgaaaaacgctacagaataaacatcaacacaaagattgcaagactgcagcagattatcccatgggtagcaagtgaacaaacagctttcgaagtaggtgattctgtaaaaaaacaggacgaagacggcgcagaaactgccgctactactcctcttccatctgccgctgctacaagcacgaagctaaataaaagcatgatcctagaaaaagctgttgactatattctatatctacaaaataacgaacgactatacgaaatggaagttcaaaggttgaaaagtgaaatcgacactttgaaacaagaccaaaaataa

SEQ ID NO: 10784 - DNA, 876 bp, Artificial Sequence
  Description of Artificial Sequence: Synthetic polynucleotide
atgaactctattttagacagaaatgttagatctagcgaaactactttaattaaacctgaatctgaatttgataattggttgagtgatgaaaatgacggagctagtcatatcaacgtcaacaaggactcctcttctgttctttctgcatcttcttccacatggttcgaaccattggaaaacattatctcctctgcatccagctcctccataggctctccaatcgaagaccagtttatatcttccaacaacgaggaatctgctctttttccaacagatcagtttttcagtaatccttcctcttactctcattctcccgaggttagcagcagtataaaaagagaagaggatgacaatgccctttctttggcagattttgaaccggcttctttgcaattaatgcctaacatgataaatactgataataatgacgatagtaccccacttaagaatgaaatcgagttgaacgactcttttataaaaacaaatttggatgctaaggaaacgaaaaagagggctccaagaaaaagattgacccccttccaaaagcaagctcacaacaagattgaaaaacgctacagaataaacatcaacacaaagattgcaagattacagcagattatcccatgggtagcaagtgaacaaacagctttcgaagtaggtgattctgtaaaaaaacaggacgaagacggcgcagaaactgccgctactactcctcttccatctgccgctgctacaagcacgaagttgaataaaagcatgatcttggaaaaagctgttgactatattctttatttacaaaataacgaaagattatacgaaatggaagttcaaaggttgaaaagtgaaatcgacactttgaaacaagaccaaaaatga

SEQ ID NO: 10785 - DNA, 2958 bp, Saccharomyces cerevisiae
atgggtgaacatggtggtcttgtagatttattggacagcgatttggaatactctataaatagggaaacacctgataaaaacaattgccttagccagcaaagtgtcaatgattcacatttaacagcaaagaccggcggcttgaatgcaaggtcttttctatctacgttaagcgatgattccttaattgaatatgtcaaccaactctcccaaactaataagaataattctaatccaactgcaggtactttaagatttactactaaaaatattagctgtgatgaattacatgctgatcttggcggtggcgaagattcacctatagctcgtagcgtcatcgagatccaggaaagtgatagcaatggtgatgatgttaaaaaaaatactgtgtatactagggaggcttatttccacgagaaggcgcacggacaaaccctgcaagatcaaatattaaaagatcaatataaagatcaaatttctagtcaaagcagtaaaatattcaaaaattgcgtcatctatataaatggctacaccaaacctggaagactgcaattacacgagatgatagttttacatggcggaaaatttttacactatttgtcttcaaagaaaacggttactcacatagtggcttccaatttaccattaaagaaaaggattgaatttgcaaattacaaagtagtcagtccggattggatagttgatagcgtcaaagaagcaagattattgccctggcaaaattactcgttaacatctaaacttgatgaacagcaaaaaaaactagataattgtaaaaccgtaaattcaattccattgccctcagagactagcctgcacaaaggatctaaatgtgtagggtcggcattgttgccagtagaacagcagtcaccagtaaatctcaataatttggaggcgaaaaggatagtcgcttgtgatgatcctgatttccttacttcctattttgctcattcgagattacatcatctctccgcatggaaggccaatctgaaagataaatttctgaatgaaaacatccacaagtacaccaaaattacggataaggatacctacattatctttcatatcgattttgactgtttttttgcaactgttgcgtatctatgtagaagttctagtttctcagcatgtgattttaaacgggatcctatagtggtatgccatggtactaaaaactccgatatagctagttgcaattatgtagcaaggtcatatgggattaaaaatggaatgtgggtgtctcaagctgaaaagatgttgccaaatgggatcaaactaatatcattaccatatacctttgagcaatttcaattaaaatcggaagccttttacagtactctcaaaagattgaacatattcaatttgattttacctatatctattgatgaagctgtttgtgtgaggataatccctgataatattcataacactaataccttaaatgcaagactgtgcgaagaaatacgccaagaaatttttcaaggaacgaatggttgcacagtgagcattggatgttccgattctcttgtgttagcaagactagctctcaaaatggcgaaaccaaatggttacaatatcacgtttaagagtaacctatctgaagaattctggtctagtttcaaactagatgatctgcctggagttgggcattctactctgtcaaggttagaatcaacgtttgatagcccacattctttaaatgacttgagaaaaagatatactttagatgctttgaaggcgagcgtcggctctaagttaggtatgaagattcatctcgcgttacaaggccaagatgatgaagaaagcttgaaaatactgtacgatcccaaagaagtcttacaaagaaaatcattatcaattgatatcaattggggaatcagatttaaaaatatcactcaggtagacttgttcatagaaagaggttgtcagtatcttttagaaaaattgaatgaaataaacaaaacaacgtcacaaatcacattaaaactgatgagaagatgtaaagacgctccaattgaacccccaaaatatatggggatgggaaggtgcgactcattcagtcggagcagcagattaggtattccaacaaacgaatttggaattattgctaccgaaatgaaaagtttgtatcgaactttgggctgccctccaatggaattaagaggtcttgctctacaattcaacaaattggttgatgtgggtccggataacaatcagctgaaactgaggttaccgtttaaaacaatagtgacgaacagagctttcgaagccttaccggaagatgtaaaaaatgacattaacaacgagttcgagaaaagaaattataagagaaaagaatccgggttgacttcaaactcattgagctctaaaaaaaaaggatttgccatttccagattagaagtaaatgatttgcccagtactatggaagaacagtttatgaatgaactaccaacccaaattcgagcagaagtaaggcacgacttgagaattcagaaaaaaatccaacagacaaagttaggaaacctacaagaaaagataaaaaggagagaagagagcctacagaacgagaaaaatcatttcatgggccaaaatagtatattccagccgatcaaattccaaaatctgacacggttcaaaaaaatttgtcaattagtgaaacaatgggttgccgaaactttaggtgatggagggccgcatgaaaaagatgttaaattattcgtgaaatatttgattaaactttgcgattctaatagagtccatttagttcttcatttatcaaacctaatatcaagggaattaaatctctgcgcctttttaaatcaggatcattcaggcttccaaacgtgggaaagaattttactcaatgatataattccacttttaaacagaaataaacatacttaccagactgtgcgtaaacttgacatggactttgaagtttga

SEQ ID NO: 10786 - DNA, 2958 bp, Artificial Sequence
  Description of Artificial Sequence: Synthetic polynucleotide
atgggtgaacatggtggtcttgtagatttattggacagcgatttggaatactctataaatagggaaacacctgataaaaacaattgccttagccagcaaagtgtcaatgattctcatttaacagcaaagaccggcggcttgaatgcaaggtcttttttatctacgttaagcgatgattccttaattgaatatgtcaaccaactctcccaaactaataagaataattctaatccaactgcaggtactttaagatttactactaaaaatattagctgtgatgaattacatgctgatcttggcggtggcgaagattctcctatagctcgtagcgtcatcgagatccaggaaagtgatagcaatggtgatgatgttaaaaaaaatactgtgtatactagggaggcttatttccacgagaaggcgcacggacaaaccttacaagatcaaatattaaaagatcaatataaagatcaaatttctagtcaaagcagtaaaatattcaaaaattgcgtcatctatataaatggctacaccaaacctggaagattacaattacacgagatgatagttttacatggcggaaaatttttacactatttgtcttccaagaaaacggttactcacatagtggcttccaatttaccattaaagaaaaggattgaatttgcaaattacaaagtagtcagtccggattggatagttgatagcgtcaaagaagcaagattattgccctggcaaaattactctttaacatctaaacttgatgaacagcaaaaaaaattggataattgtaaaaccgtaaattctattccattgccctctgagactagcttgcacaaaggatctaaatgtgtagggtctgcattgttgccagtagaacagcagtctccagtaaatctcaataatttggaggcgaaaaggatagtcgcttgtgatgatcctgatttccttacttcctattttgctcattccagattacatcatctctccgcatggaaggccaatttgaaagataaatttttgaatgaaaacatccacaagtacaccaaaattacggataaggatacctacattatctttcatatcgattttgactgtttttttgcaactgttgcgtatttatgtagaagttctagtttcagtgcatgtgattttaaaagagatcctatagtggtatgccatggtactaaaaactccgatatagctagttgcaattatgtagcaaggagttatgggattaaaaatggaatgtgggtgtctcaagctgaaaagatgttgccaaatgggatcaaattgatatctttaccatatacctttgagcaatttcaattaaaaagtgaagccttttacagtactctcaaaagattgaacatattcaatttgattttacctatatctattgatgaagctgtttgtgtgaggataatccctgataatattcataacactaataccttaaatgcaagattgtgcgaagaaatacgccaagaaatttttcaaggaacgaatggttgcacagtgagcattggatgttccgattctcttgtgttagcaagattggctctcaaaatggcgaaaccaaatggttacaatatcacgtttaagagtaacttatctgaagaattctggtctagtttcaaattggatgatttacctggagttgggcattctactttatctaggttagaaagtacgtttgatagcccacattctttaaatgacttgagaaaaagatatactttagatgctttgaaggcgagcgtcggctctaagttaggtatgaagattcatctcgcgttacaaggccaagatgatgaagaaagcttgaaaatattatacgatcccaaagaagtcttacaaagaaaatctttatccattgatatcaattggggaatcagatttaaaaatatcactcaggtagacttgttcatagaaagaggttgtcagtatcttttagaaaaattgaatgaaataaacaaaacaacgtctcaaatcacattaaaattaatgagaagatgtaaagacgctccaattgaacccccaaaatatatggggatgggaaggtgcgactctttcagtagaagcagcagattaggtattccaacaaacgaatttggaattattgctaccgaaatgaaaagtttgtatagaactttgggctgccctccaatggaattaagaggtcttgctttacaattcaacaaattggttgatgtgggtccggataacaatcagttgaaattgaggttaccgtttaaaacaatagtgacgaacagagctttcgaagccttaccggaagatgtaaaaaatgacattaacaacgagttcgagaaaagaaattataagagaaaagaatccgggttgacttctaactctttgagctctaaaaaaaaaggatttgccatttccagattagaagtaaatgatttgcccagtactatggaagaacagtttatgaatgaattaccaacccaaattagagcagaagtaaggcacgacttgagaattcagaaaaaaatccaacagacaaagttaggaaacttacaagaaaagataaaaaggagagaagagagcttacagaacgagaaaaatcatttcatgggccaaaatagtatattccagccgatcaaattccaaaatttgacaagattcaaaaaaatttgtcaattagtgaaacaatgggttgccgaaactttaggtgatggagggccgcatgaaaaagatgttaaattattcgtgaaatatttgattaaactttgcgattctaatagagtccatttagttcttcatttatctaacttgatatctagggaattaaatctctgcgcctttttaaatcaggatcattctggcttccaaacgtgggaaagaattttactcaatgatataattccacttttaaacagaaataaacatacttaccagactgtgcgtaaacttgacatggactttgaagtttga

SEQ ID NO: 10787 - DNA, 1521 bp, Saccharomyces cerevisiae
atgccagagtccagattgcagagactagctaatttgaaaataggaactccgcagcagctcagacgcacctccataataggtaccattgggcccaagacaaatagctgcgaggccattactgctctgagaaaagctggtttgaacatcattcgattgaacttttcccatggctcctacgaattccatcaatcagtaatcgaaaatgctgtgaaatcggaacagcaattccctggcaggccgctcgccattgccctggataccaagggtcccgagatcagaacaggtcgcacgttaaatgaccaagatctttatatccccgtagaccaccaaatgatctttaccactgacgcaagttttgcaaacacctccaatgataaaatcatgtatatagactatgctaacctgacaaaagttatcgttccggggagatttatatacgtggacgacgggattctctcttttaaagtgctccaaatcattgacgaatctaatttaagggtgcaagcggtaaactcgggttatatcgcatctcataaaggtgttaatctgcctaataccgacgttgatttgccccccttgtccgccaaagacatgaaggacttgcaattcggagtccgcaatggcattcacatcgtatttgcctctttcataagaacttcagaagatgtgttgtctatcagaaaagcgttgggttctgaagggcaagatatcaagattatatccaagatagaaaaccagcaagggttggataattttgacgaaatcctggaagtcacggatggtgttatgatagcgagaggcgatttaggaattgaaatcctggcacctgaagtattagccattcaaaaaaagctgattgcaaaatgtaatttggcgggcaaacctgtcatttgcgcgactcagatgctggattcaatgacacacaatccgagaccgacaagggctgaagtatcggatgtgggtaacgctgtgttggatggtgctgattgtgttatgctttctggagaaacggcgaagggtgattatccggtgaatgcagttaatattatggcggcgaccgctctgattgctgaaagtactatcgctcatttggctctttatgacgatctcagagacgccactcccaaacctacttccactacggaaactgtagcagctgcagctaccgcagcaatcttggagcaagatggtaaggccatcgttgtattatctactacagggaacacggcaaggctactgtcgaagtatagaccaagctgccctatcatattagtaacaagacacgcaagaacggcaagaattgcgcatttgtatagaggtgttttcccatttctgtatgaaccgaaacgcctagacgactggggtgaggatgttcataggcgcctaaagtttggtgttgaaatggcgaggtctttcggaatggtggacaacggtgatactgttgtttccattcaaggattcaaaggaggagtcggccattccaataccttacgcatttctactgttggtcaagaattctag

SEQ ID NO: 10788 - DNA, 1521 bp, Artificial Sequence
  Description of Artificial Sequence: Synthetic polynucleotide
atgccagagtccagattgcagagattggctaatttgaaaataggaactccgcagcagctcagacgcacctccataataggtaccattgggcccaagacaaatagctgcgaggccattactgctttgagaaaagctggtttgaacatcattagattgaacttttcccatggctcctacgaattccatcaaagtgtaatcgaaaatgctgtgaaaagtgaacagcaattccctggcaggccgctcgccattgccttggataccaagggtcccgagatcagaacaggtcgcacgttaaatgaccaagatctttatatccccgtagaccaccaaatgatctttaccactgacgcaagttttgcaaacacctccaatgataaaatcatgtatatagactatgctaacttaacaaaagttatcgttccggggagatttatatacgtggacgacgggattctctcttttaaagtgctccaaatcattgacgaatctaatttaagggtgcaagcggtaaacagtggttatatcgcatctcataaaggtgttaatttacctaataccgacgttgatttgccccccttgtccgccaaagacatgaaggacttgcaattcggagtccgcaatggcattcacatcgtatttgcctctttcataagaacttctgaagatgtgttgtctatcagaaaagcgttgggttctgaagggcaagatatcaagattatatccaagatagaaaaccagcaagggttggataattttgacgaaatcttggaagtcacggatggtgttatgatagcgagaggcgatttaggaattgaaatcttggcacctgaagtattagccattcaaaaaaagttgattgcaaaatgtaatttggcgggcaaacctgtcatttgcgcgactcagatgcttgattctatgacacacaatccgagaccgacaagggctgaagtatctgatgtgggtaacgctgtgttggatggtgctgattgtgttatgctttctggagaaacggcgaagggtgattatccggtgaatgcagttaatattatggcggcgaccgctttgattgctgaaagtactatcgctcatttggctctttatgacgatctcagagacgccactcccaaacctacttccactacggaaactgtagcagctgcagctaccgcagcaatcttggagcaagatggtaaggccatcgttgtattatctactacagggaacacggcaaggttattatccaagtatagaccaagctgccctatcatattagtaacaagacacgcaagaacggcaagaattgcgcatttgtatagaggtgttttcccatttttatatgaaccgaaacgcttggacgactggggtgaggatgttcataggcgcttgaagtttggtgttgaaatggcgaggtctttcggaatggtggacaacggtgatactgttgtttccattcaaggattcaaaggaggagtcggccattccaataccttacgcatttctactgttggtcaagaattctga

SEQ ID NO: 10789 - DNA, 1884 bp, Saccharomyces cerevisiae
atggtaaatatactgcccttccacaagaacaatagacacagcgcgggagtcgtcacctgcgcggacgatgttagcggcgacggtagcggcggcgacaccaagaaggaggaggatgttgtccaggtaacggaatcaccatcgtccgggtcgcgcaataatcatcgcagcgacaatgaaaaagatgacgccatccgtatggagaaaatatctaagaaccagtccgcgtcgtccaacggcaccatccgcgaggatttgattatggacgtggacttggagaaatcgccctccgtcgatggcgatagcgagccgcacaaactaaaacaaggtttgcagtcgcgccatgtgcaactgatcgcgctgggcggcgccatcggtaccggtttgctggtggggacttcatccacgcttcatacgtgcggtcccgcggggctgttcatatcgtacattattatttccgcggtgatctacccgatcatgtgcgcgctgggcgaaatggtgtgctttttgcccggtgatggttctgacagtgccgggtcgacggccaatctggtcactaggtacgttgacccttcgttgggcttcgccactgggtggaattacttctactgctacgtcattttagtggccgccgagtgtacggcggcatccggtgtggtcgaatactggaccaccgcggttcccaagggcgtttggatcacgatctttctatgcgtggttgttatactaaacttttccgcggtcaaagtgtacggcgaatccgagttttggttcgcgtctatcaagatattatgcattgtgggactgatcattctgtcctttattttgttttggggtggtggccccaaccatgaccgtcttggcttcagatactggcaacatccgggcgcttttgcgcatcacctcacgggcggatcgctgggtaacttcacagatatctacactgggattatcaagggcgccttcgccttcattcttggtccggaactggtgtgcatgacttccgcggaatgcgcggaccagcgtagaaatatcgctaaggcttcgcgccgctttgtatggagactgatcttcttctacgttctggggacgctggccatctccgttattgttccatacaatgacccaacattggtaaatgcgctggcgcagggcaaaccgggagccggctcgtcaccctttgtgatcggaattcaaaacgccgggattaaggttcttccccacattatcaatgggtgtatcttgaccagcgcgtggtctgccgccaatgcgtttatgtttgcgagcacgagatcactgttgaccatggcgcaaacgggacaggcacccaaatgtttgggcagaatcaacaaatggggtgttccatacgtggctgtgggtgtttccttcttgtgttcttgtttggcatatctgaacgtgtcttcatccacggcagacgtgtttaattggttttccaatatcagcaccatttccgggtttctgggctggatgtgcggctgcatcgcgtacctgagattccgcaaggctattttctacaatggcctctacgacagattgcctttcaagacgtggggacagccttacaccgtgtggttctctctcattgttataggcatcatcaccattaccaacgggtatgccattttcatccctaagtactggagagtagcagatttcattgctgcctacatcaccctacccatcttcctggttttgtggttcggccataagctgtatactcggacgtggagacaatggtggctccctgtgtccgagatcgatgttactacagggttagtcgagatcgaggagaaatcaagagaaattgaggagatgagattaccccccaccggtttcaaagacaagttcttggacgccttgttgtaa

SEQ ID NO: 10790 - DNA, 1884 bp, Artificial Sequence
  Description of Artificial Sequence: Synthetic polynucleotide
atggtaaatatattgcccttccacaagaacaatagacacagcgcgggagtcgtcacctgcgcggacgatgttagcggcgacggtagcggcggcgacaccaagaaggaggaggatgttgtccaggtaacggaatctccatcttccgggtctcgcaataatcatcgcagcgacaatgaaaaagatgacgccatccgtatggagaaaatatctaagaaccagtccgcgtcttccaacggcaccatccgcgaggatttgattatggacgtggacttggagaaaagtccctccgtcgatggcgatagcgagccgcacaaattgaaacaaggtttgcagtcccgccatgtgcaattgatcgcgttgggcggcgccatcggtaccggtttgttggtggggacttcttccacgcttcatacgtgcggtcccgcggggcttttcatatcttacattattatttccgcggtgatctacccgatcatgtgcgcgttgggcgaaatggtgtgctttttgcccggtgatggttctgacagtgccgggtccacggccaatttggtcactaggtacgttgacccttctttgggcttcgccactgggtggaattacttctactgctacgtcattttagtggccgccgagtgtacggcggcatccggtgtggtcgaatactggaccaccgcggttcccaagggcgtttggatcacgatctttttatgcgtggttgttatattaaacttttccgcggtcaaagtgtacggcgaatccgagttttggttcgcgtctatcaagatattatgcattgtgggattgatcattttatcctttattttgttttggggtggtggccccaaccatgaccgtcttggcttcagatactggcaacatccgggcgcttttgcgcatcacctcacgggcggatctttgggtaacttcacagatatctacactgggattatcaagggcgccttcgccttcattcttggtccggaattagtgtgcatgacttccgcggaatgcgcggaccagcgtagaaatatcgctaaggctagtcgccgctttgtatggagattgatcttcttctacgttttggggacgttggccatctccgttattgttccatacaatgacccaacattggtaaatgcgttagcgcagggcaaaccgggagccggctcttctccctttgtgatcggaattcaaaacgccgggattaaggttcttccccacattatcaatgggtgtatcttgaccagcgcgtggtctgccgccaatgcgtttatgtttgcgagcacgagatctttgttgaccatggcgcaaacgggacaggcacccaaatgtttgggcagaatcaacaaatggggtgttccatacgtggctgtgggtgtttccttcttgtgttcttgtttggcatatttgaacgtgtcttcttccacggcagacgtgtttaattggttttccaatatcagcaccatttccgggtttttgggctggatgtgcggctgcatcgcgtacttgagattccgcaaggctattttctacaatggcctctacgacagattgcctttcaagacgtggggacagccttacaccgtgtggttctctctcattgttataggcatcatcaccattaccaacgggtatgccattttcatccctaagtactggagagtagcagatttcattgctgcctacatcaccttgcccatcttcttggttttgtggttcggccataagctttatactagaacgtggagacaatggtggctccctgtgtccgagatcgatgttactacagggttagtcgagatcgaggagaaatctagagaaattgaggagatgagattaccccccaccggtttcaaagacaagttcttggacgccttgttgtga

SEQ ID NO: 10791 - DNA, 3045 bp, Saccharomyces cerevisiae
atgaacaatattcgggccttgctggactcgatacaatctggagttcagaccgtttctccagaaaagcaccaacagacgattgccgcgatcaacaaatttcaagatgatcctgcacttctagacaccatactaccgagatgcgtgcctcttttgaccaagtcgttcttttgtatgtcacagcgtgatcagaaacttgttgcggagcttttctacaatcttgacaagatctcccactcaaaagtccttaaatcattagatacaagtatttttagattaaacgaaattttaaactatttacaagatcgagcctcgccctcttctttcagcgatgtcttgtgcgtctatctaaacctttcttggctaagcgtcattctgctttcaccttacgcattcaaagataaattcaacaaaacgcttcaagtatcttccaggttcgagaactaccccatttgcatacctccaattaacaagatcaaagccgttttatatttcaaaaacttcacagatgcctttgaccagctaccggaacgggaacaggcaaatgtgccgtttctcaaccaatttttaaagctgtttattcagtcttcggaaaaggcaaactactacttctccaatgaaaatctaagacacttacaacaagttgcactgtccaatgacggaataaagctgctgccaaaattattccagatttcgttcaatcatggctctcatgatatcctagatgctatagtagaattcttccatgaccatttaagttcgaattccacagacacaagattccaattggcacactccttcgctaaaattgccaagttcctgcaccaggcagatccagcatcttttatcgagctcattgattataccatcgaaaatacggtttccctattacaggctccttgcgattctatcgatagcaatgagctgcacacttcccttctgatcatcgccgaggtggctctggccaaaattctgcctatagatctagtcgaccgcgtattgactctgatcatccctaaaacatgtcattttcagaaatctcactttcaaatcatcaagggccaccatatcagggactcgacaaacttcattatctggtcagtaataaggtcaaaccgtagcaatagtttatcgccgcaggttctacaatcactactttctcatctgttaataaacgccttttttgaccccgaattaataatcagatactcgagttttgccgcgctccaagaattattgggcaggtccaacaaatctcttgcgctaaatcaaaatgacattgctttgatattgcaagcaaattggaaggatctaccgaggtctttcgaggagaactctggtctaattcgtaggctgttcaaccccgaaaacacctccaaaagtgctgtttgcgtatggaaggtattccgcgattggtccttcaattggaatttactagagaatttacatttgaccacaatgaaactcaacatagattataacctagttccattaatcaagtcgaaattatcttcacccgctttattgcaagaggtattaaacaaggctggcagctcagttacacaaaattgtcaaattttgtacttgtacttgaaactattcgaaaatgacgtaaattgcccgaaaataagcgagatttgtatcgacatttaccagaaaaagataaaattccaattaactactcaagcgaaaagacaatttaacgataattcgcccgaactgtttcaaatttttgtcattttgaaatactggcaattaacaggacaaaatgatttcaatcaggaattgttttggaaatttgtagacatagtatccccacaaaagaagttaaatctgtacaacgaattcatccctataatacagcaaataatatctcaatgcgttagcctaaactacacaaggattgttcaattaattaaatcagataacgaactgacttgccgatcaatatgtcatatgcccgatcaagaaaagatgtgttcccttttcttctcccagttccccctattgtcacctcaatccagatcgcttttgataggcgaacttgatcatcattgggatgttagaataagcttactcccgtcgaattcgtatcgaaaatttcgcaacatcattatcaactgtctcgatgattatacaataactcaacagggtgatgtaggacgtctggtaagaatacaggctttaaaacttatgcaatcccatcccgatttcttatctggtgattgcgactccatcaatccaaaattaacgagattgctggcggaacctgtaccagagatcagaaaactaagttatcaattacttgcttcggccacatcacaaatcactgtgttatctgactcttcgatactcaatttccgtcacaagcaaggtttaagtgaagaattctggaaaggatatgcagtgagcgctggagcaatacattttacagattctcagcttacttcatcaatagattcatttatcgtatactacagatctttgtctccttcacaacagctggaattatgccacgatttaatcagaataattccaagcgctaaacaaatcgctgaatcaagaatacgcgatcgtaacaaggatccattaacaggaggtatgagatttgacaccatcaaattcaccattcattgtgtaaaattttggactagaatcatggaatctgggttggttgttctacatccaaattttaattttcagggtgttttcgccaagttctataacctacatttattagattgtacgacattgagagtaagcgtgatcaaattcttcccgttcttggcaatatcttgttaccacacaatgagagaaaatgctgaccagaagaatctatccaacataatactgaaaaggttgttggttcttgtgaaacgtgaatacgccgcaacaaaatcaaaatttatgactgatcaaaatgtcgctttacaaggtatgttccagatatttttggaattaggtgtcaccaggcaactccaagctctacaagtggcctgccagaaacatgaattggcgaatatattagagtctgatatcactttatag

SEQ ID NO: 10792 - DNA, 3045 bp, Artificial Sequence
  Description of Artificial Sequence: Synthetic polynucleotide
atgaacaatattagagccttgttggacagtatacaatctggagttcagaccgtttctccagaaaagcaccaacagacgattgccgcgatcaacaaatttcaagatgatcctgcacttttggacaccatattaccgagatgcgtgcctcttttgaccaagagtttcttttgtatgtctcagcgtgatcagaaacttgttgcggagcttttctacaatcttgacaagatctcccactctaaagtccttaaatctttagatacaagtatttttagattaaacgaaattttaaactatttacaagatagagcctctccctcttctttcagcgatgtcttgtgcgtctatttgaacctttcttggttaagcgtcattttactttctccttacgcattcaaagataaattcaacaaaacgcttcaagtatcttccaggttcgagaactaccccatttgcatacctccaattaacaagatcaaagccgttttatatttcaaaaacttcacagatgcctttgaccagttaccggaaagagaacaggcaaatgtgccgtttctcaaccaatttttaaagttatttattcagtcttctgaaaaggcaaactactacttctccaatgaaaatttaagacacttacaacaagttgcattgtccaatgacggaataaagttattaccaaaattattccagatttctttcaatcatggctctcatgatatcttagatgctatagtagaattcttccatgaccatttaagtagtaattccacagacacaagattccaattggcacactccttcgctaaaattgccaagttcttgcaccaggcagatccagcatcttttatcgagctcattgattataccatcgaaaatacggtttccttattacaggctccttgcgattctatcgatagcaatgagttgcacacttcccttttgatcatcgccgaggtggctttggccaaaattttacctatagatttggtcgaccgcgtattgactttgatcatccctaaaacatgtcattttcagaaatctcactttcaaatcatcaagggccaccatatcagggactctacaaacttcattatctggtctgtaataaggtctaaccgtagcaatagtttatctccgcaggttttgcaatctttactttctcatcttttaataaacgccttttttgaccccgaattaataatcagatactctagttttgccgcgctccaagaattattgggcaggtccaacaaatctcttgcgttgaatcaaaatgacattgctttgatattgcaagcaaattggaaggatttaccgaggtctttcgaggagaactctggtttgattcgtaggttgttcaaccccgaaaacacctccaaaagtgctgtttgcgtatggaaggtattccgcgattggtccttcaattggaatttattggagaatttacatttgaccacaatgaaactcaacatagattataacttggttccattaatcaagagtaaattatcttctcccgctttattgcaagaggtattaaacaaggctggcagctctgttacacaaaattgtcaaattttgtacttgtacttgaaattattcgaaaatgacgtaaattgcccgaaaataagcgagatttgtatcgacatttaccagaaaaagataaaattccaattaactactcaagcgaaaagacaatttaacgataattctcccgaattatttcaaatttttgtcattttgaaatactggcaattaacaggacaaaatgatttcaatcaggaattgttttggaaatttgtagacatagtatccccacaaaagaagttaaatctttacaacgaattcatccctataatacagcaaataatatctcaatgcgttagcttgaactacacaaggattgttcaattaattaaatctgataacgaattgacttgcagaagtatatgtcatatgcccgatcaagaaaagatgtgttcccttttcttctcccagttccccttattgtctcctcaatccagatctcttttgataggcgaacttgatcatcattgggatgttagaataagcttactcccgtccaattcttatagaaaatttcgcaacatcattatcaactgtctcgatgattatacaataactcaacagggtgatgtaggacgtttagtaagaatacaggctttaaaacttatgcaatcccatcccgatttcttatctggtgattgcgactccatcaatccaaaattaacgagattgttagcggaacctgtaccagagatcagaaaattaagttatcaattacttgcttctgccacatctcaaatcactgtgttatctgactcttctatactcaatttccgtcacaagcaaggtttaagtgaagaattctggaaaggatatgcagtgagcgctggagcaatacattttacagattctcagcttacttcttctatagattcttttatcgtatactacagatctttgtctccttctcaacagttagaattatgccacgatttaatcagaataattccaagcgctaaacaaatcgctgaatctagaatacgcgatcgtaacaaggatccattaacaggaggtatgagatttgacaccatcaaattcaccattcattgtgtaaaattttggactagaatcatggaatctgggttggttgttttgcatccaaattttaattttcagggtgttttcgccaagttctataacttacatttattagattgtacgacattgagagtaagcgtgatcaaattcttcccgttcttggcaatatcttgttaccacacaatgagagaaaatgctgaccagaagaatttatccaacataatattgaaaaggttgttggttcttgtgaaacgtgaatacgccgcaacaaaatctaaatttatgactgatcaaaatgtcgctttacaaggtatgttccagatatttttggaattaggtgtcaccaggcaactccaagctttacaagtggcctgccagaaacatgaattggcgaatatattagagtctgatatcactttatga

SEQ ID NO: 10793 - DNA, 1992 bp, Saccharomyces cerevisiae
atgaagttactttttaaaagatattcgtctagtcatattggtaagctgattaaggactctttaatcactcctgaaatactaccacagctagggcgacagccatcatcgcataaacgtttaccaaataacaaaagaactaactcaataactgataaatggttgaaggatgcgctaacaagaaaagataaactgaatgaagataagctccaaaatgtaaatttacgattaaatgtggtactgactactctacagaagcttcgtacatccgataatcctgctttgtattttgcgttgttgaatcgtattggcacaggtcacataaaatggctaaataaaagtggccgacagattgatgcattcccacctgatcggctgcctttggaattttatcatgagctatctaatatgctctataaactatcgcttcggtccgcaaatgacaaaattgcactagctaaattttcattgcaattattggatcgctattattttcttaaaaccaaatctttaactatagaaggaaaatttcgggcaaacataaaatttttgaggaattgtactcttttaattgttaaatcccaatcgaactactacttaagggcaatacagcggttgttcgcggaaaattcggagggtcaattattagccaatttatcccagctggcattttatgtggagacctcccaatggacaagtatgttggatattttatcctcatgtgtaccggattctggtttaagaggttcgaaggagcgtgaaagagctattcaattgttggagttatttagtccatgcctagtcaaaagtctaaaagtaatgatagcacaaaatatggagaatgaagcttgtcagattttaaggagcttgtctgaatggaactttcattttgatcagcatgattcctccaacttgatacaattatcccagaaccattcttgcctcaaagttattgaaaccatgaatggattatcatcaactaccgctgtcactaggcaattcggacttgaaaaattaccaactgacgtgagtttgaagcagagcatacatattttatcaaaagataatttcgaacctctcaagcaagattcatttcttcaatttctatcgtttaaattaagtgatttgcctctgaacttagaagtatggaaaaagcacattaaggaggttgatgaccaaatgcaggctgagtccaacctgcattccttaagagctttttttattgatatgctactgtgtcacttatctgtgcgcaaggatttcgattttatgctttcattggtcgagcacatagtatacgaaaaaaatttatggcagccattattactcacagataatatagttggaaacaaagaaaattccacttttcattgcctctttcatggcgcctctcaagatatttctaccaaacttactctactggcattgtataaccagttgaatgaaatcggctatcaatttacctcccacgattttctctcgatgttgaaagtctgcaaaaactactctgattctgattttttctattttgctttctataatttgttggttacacaaagtcacaaattttttcttttcgataagtttagtgataagttttcgtggaggttgccaatacaaatcggagatgcaatttctgaatggctatccagcttagaaattgatatacaagaaaacaccgatagagttttgcagataacagatgacgtcggcgaatggtatgttgagaataaaccatttaagtcagaaaaagggaccattcaaccaataaacataatggaattgcgcaaaatttttggggagcgaaaaactctatttcatatggattcagaaattttccaaaaatctaaagcaaaaagagataaagaaatgcggaatgaagctttatttaccgcaaatgatgcggaatataattttgctgcggatgtatcctatgcaaagagagtagaaaatctattttcttacataagatctaagcaaatgcaacaaaaataa

SEQ ID NO: 10794 - DNA, 1992 bp, Artificial Sequence
  Description of Artificial Sequence: Synthetic polynucleotide
atgaagttactttttaaaagatattcttctagtcatattggtaagttgattaaggactctttaatcactcctgaaatattgccacagttagggagacagccatcttctcataaacgtttaccaaataacaaaagaactaacagcataactgataaatggttgaaggatgcgttaacaagaaaagataaattgaatgaagataagctccaaaatgtaaatttaagattaaatgtggtattgactactttacagaagcttcgtacatccgataatcctgctttgtattttgcgttgttgaatcgtattggcacaggtcacataaaatggttaaataaaagtggcaggcagattgatgcattcccacctgatagattacctttggaattttatcatgagctttctaatatgctctataaattatctcttcgttccgcaaatgacaaaattgcattggctaaattttctttgcaattattggatcgctattattttcttaaaaccaaatctttaactatagaaggaaaatttagagcaaacataaaatttttgaggaattgtactcttttaattgttaaatcccaaagtaactactacttaagggcaatacagcgtttgttcgcggaaaattctgagggtcaattattagccaatttatcccagttagcattttatgtggagacctcccaatggacaagtatgttggatattttatcctcttgtgtaccggattctggtttaagaggttccaaggagcgtgaaagagctattcaattgttggagttatttagtccatgcttagtcaaaagtttgaaagtaatgatagcacaaaatatggagaatgaagcttgtcagattttaaggagcttgtctgaatggaactttcattttgatcagcatgattcctccaacttgatacaattatcccagaaccattcttgcctcaaagttattgaaaccatgaatggattatcttctactaccgctgtcactaggcaattcggacttgaaaaattaccaactgacgtgagtttgaagcagagcatacatattttatccaaagataatttcgaacctctcaagcaagattcttttcttcaatttttatcttttaaattaagtgatttgcctttgaacttagaagtatggaaaaagcacattaaggaggttgatgaccaaatgcaggctgagtccaacttacattccttaagagctttttttattgatatgttattatgtcacttatctgtgcgcaaggatttcgattttatgctttctttggtcgagcacatagtatacgaaaaaaatttatggcagccattattactcacagataatatagttggaaacaaagaaaattccacttttcattgcctctttcatggcgcctctcaagatatttctaccaaacttactttattggcattgtataaccagttgaatgaaatcggctatcaatttacctcccacgattttctctctatgttgaaagtctgcaaaaactactctgattctgattttttctattttgctttctataatttgttggttacacaaagtcacaaattttttcttttcgataagtttagtgataagttttcttggaggttgccaatacaaatcggagatgcaatttctgaatggttatccagcttagaaattgatatacaagaaaacaccgatagagttttgcagataacagatgacgtcggcgaatggtatgttgagaataaaccatttaagtctgaaaaagggaccattcaaccaataaacataatggaattgcgcaaaatttttggggagagaaaaactttatttcatatggattctgaaattttccaaaaatctaaagcaaaaagagataaagaaatgagaaatgaagctttatttaccgcaaatgatgcggaatataattttgctgcggatgtatcctatgcaaagagagtagaaaatttattttcttacataagatctaagcaaatgcaacaaaaatga

SEQ ID NO: 10795 - DNA, 1494 bp, Saccharomyces cerevisiae
atgagaccgttgtatagctgcaaccttgcaaccaaagatgatattgagatggcaggtggcgtagctcctgctcacctggaagttaatgtaggcggctataatacagagcagacaatacctatagtaaagcatcagctcgtgaaagttgggagaaatgataaggaatgtcaactcgttctaacgaatccctctatctcctctgttcattgcgtgttttggtgtgtcttttttgatgaggatagtattccaatgttctacgttaaagattgttctcttaatggaacgtatttgaacggtttgcttttgaaaagggacaaaacgtatcttttaaaacattgcgacgttattgaattatcgcagggaagtgaagaaaatgacattaaaaaaacacgactagtttttatgattaatgatgatttacaatcttctctggacccaaaacttttagatcaaatgggttttctgagggaagtagaccaatgggaaataacaaatagaatagtgggtaatggcactttcggtcatgttctgatcacgcataactcaaaagaacgtgatgaagatgtctgttatcaccctgaaaattatgctgtgaagatcattaaactaaaaccaaataaattcgataaagaggctcgaatccttttgagactggatcacccaaatattatcaaagtctaccatactttctgtgacaggaacaatcacctttacatattccaggatcttatccctggtggtgatttgttttcttacctagctaaaggcgactgtctaacttccatgtcagaaactgaatcgctattgatcgtctttcaaattttgcaagctttaaactaccttcatgatcaagacattgttcaccgcgatttgaaactagacaatattttgttatgtacgccagaaccgtgcactagaatcgtcttggcagactttggtatagctaaagatttaaattccaacaaagaaagaatgcatactgtcgtaggcactccggaatactgcgctccagaagttggattcagagcaaacagaaaagcatatcaaagcttctcaagagcagctacgttagagcaacgaggttatgacagtaaatgtgatctttggtctttgggtgtcattacacacattatgttaacagggatctcgcctttttatggagatggttctgagaggagtattattcaaaatgcaaaaattgggaagctgaatttcaaactgaagcagtgggatattgtttcagataatgccaagagttttgtcaaagaccttttgcaaactgacgtagttaaacgattaaatagtaagcaaggtctcaaacatatttggattgcaaaacacttaagtcaattagagagattatattacaaaaagatattgtgcaataacgaaggccctaaactagaaagtataaattcagactggaaaaggaagttacccaaaagtgttatcatttctcaggcaataccgaaaaagaagaaggttttggagtaa

SEQ ID NO: 10796 - DNA, 1494 bp, Artificial Sequence
  Description of Artificial Sequence: Synthetic polynucleotide
atgagaccgttgtatagctgcaaccttgcaaccaaagatgatattgagatggcaggtggcgtagctcctgctcacttggaagttaatgtaggcggctataatacagagcagacaatacctatagtaaagcatcagctcgtgaaagttgggagaaatgataaggaatgtcaactcgttttgacgaatccctctatctcctctgttcattgcgtgttttggtgtgtcttttttgatgaggatagtattccaatgttctacgttaaagattgttctcttaatggaacgtatttgaacggtttgcttttgaaaagggacaaaacgtatcttttaaaacattgcgacgttattgaattatctcagggaagtgaagaaaatgacattaaaaaaacaaggttggtttttatgattaatgatgatttacaatcttctttggacccaaaacttttagatcaaatgggttttttaagggaagtagaccaatgggaaataacaaatagaatagtgggtaatggcactttcggtcatgttttgatcacgcataactccaaagaacgtgatgaagatgtctgttatcaccctgaaaattatgctgtgaagatcattaaattgaaaccaaataaattcgataaagaggctagaatccttttgagattagatcacccaaatattatcaaagtctaccatactttctgtgacaggaacaatcacctttacatattccaggatcttatccctggtggtgatttgttttcttacttggctaaaggcgactgtttaacttccatgtctgaaactgaatctttgttgatcgtctttcaaattttgcaagctttaaactaccttcatgatcaagacattgttcaccgcgatttgaaattagacaatattttgttatgtacgccagaaccgtgcactagaatcgtcttggcagactttggtatagctaaagatttaaattccaacaaagaaagaatgcatactgtcgtaggcactccggaatactgcgctccagaagttggattcagagcaaacagaaaagcatatcaaagcttcagtagagcagctacgttagagcaaagaggttatgacagtaaatgtgatctttggtctttgggtgtcattacacacattatgttaacagggatctctcctttttatggagatggttctgagaggagtattattcaaaatgcaaaaattgggaagttgaatttcaaattgaagcagtgggatattgtttctgataatgccaagagttttgtcaaagaccttttgcaaactgacgtagttaaaagattaaatagtaagcaaggtctcaaacatatttggattgcaaaacacttaagtcaattagagagattatattacaaaaagatattgtgcaataacgaaggccctaaattagaaagtataaatagtgactggaaaaggaagttacccaaaagtgttatcatttctcaggcaataccgaaaaagaagaaggttttggagtga

SEQ ID NO: 10797 - DNA, 1032 bp, Saccharomyces cerevisiae
atgtctgagccaaacacaccattacatgctcaaccgaatgagcaactggacttgaacaacttaaatgatctagatgaaaaagacattgatgatttaaacttggatccaaactcagatgtagaaattagtgcagactcaggtgatgtcgtaaattctaacatagacaacgttatatggcagcgtaattgtaataagaaaagaagatatcatacaccagaattcaatgatgtttacaatgaaactaacaacacaatcaacgacgtaactatgctcgatgatgttgacgatttccagcctagaataaacgtgtcttctcccttttcgtctgccacaaagctgagtgaattattgccaaatgatcacaatggaacgtcacacccgagaagattgtcaatgtctcaacaatccaaattcatctcttacgttgatgatcagcttttacaaattcaaagaaaatttgttcaatccaggggcctgaatatcaaaaacggctatgccagtcttactccgctgctgcaggatttaaaaactttagttgacttcgtttggtattctattgcccatgttccaaactcagactatttacttcaatcagaagaaaagagacattgcccagattcccgaaacccaaaagatacatgcggatattctagttattttggtcaagggtcctatttaataaaaattgcggacgatctcatcgattacgttgaaaaatttacattcaaaaatatggaagactcagagattaatgacactttatccaaattattcaaactcttcttcatccttgacaggatatttgtaattctaactgatgataatgataattgcaaagaagtccctaaaacgtcttcagccagcaagaacatagcaggattgaatgggactgatattgtgaggttaaaaggtatcgcggaacgaacaagagttcgcctacccatatttttggaatcccagggtatccatggttaccattatgaattaagcaagatttacgagggatttttagaccatgccaattcattttaa

SEQ ID NO: 10798 - DNA, 1032 bp, Artificial Sequence
  Description of Artificial Sequence: Synthetic polynucleotide
atgtctgagccaaacacaccattacatgctcaaccgaatgagcaattggacttgaacaacttaaatgatttggatgaaaaagacattgatgatttaaacttggatccaaacagtgatgtagaaattagtgcagactctggtgatgtcgtaaattctaacatagacaacgttatatggcagcgtaattgtaataagaaaagaagatatcatacaccagaattcaatgatgtttacaatgaaactaacaacacaatcaacgacgtaactatgctcgatgatgttgacgatttccagcctagaataaacgtgtcttctcccttttcttctgccacaaagttgagtgaattattgccaaatgatcacaatggaacgagccacccgagaagattgtccatgtctcaacaatccaaattcatctcttacgttgatgatcagcttttacaaattcaaagaaaatttgttcaatccaggggcttgaatatcaaaaacggctatgccagtcttactccgttattgcaggatttaaaaactttagttgacttcgtttggtattctattgcccatgttccaaacagcgactatttacttcaaagtgaagaaaagagacattgcccagattccagaaacccaaaagatacatgcggatattctagttattttggtcaagggtcctatttaataaaaattgcggacgatctcatcgattacgttgaaaaatttacattcaaaaatatggaagactctgagattaatgacactttatccaaattattcaaactcttcttcatccttgacaggatatttgtaattttgactgatgataatgataattgcaaagaagtccctaaaacgtcttctgccagcaagaacatagcaggattgaatgggactgatattgtgaggttaaaaggtatcgcggaaagaacaagagttcgcttgcccatatttttggaatcccagggtatccatggttaccattatgaattaagcaagatttacgagggatttttagaccatgccaattctttttga

SEQ ID NO: 10799 - DNA, 2376 bp, Saccharomyces cerevisiae
atggtagcgacatcttcaaagaggacgttggatccgaaggaggaacatttgcctgctgacaaaacatccactaattcaagcaacactataatatctgagttggcaacacaagagaaatccagctctagtggtactacactaaaattaatagctcttaatatcaagtccatatcagatgaagatgtgggatatatccaaaatgttgaaagactgtctttaaggaaaaatcacttaacatccttaccagcgagtttcaagaggttatcaaggctgcaatatctggatttgcataataacaattttaaagaaatcccatatattttgacacaatgccctcaattagagatcttggatctgtcctccaatgagattgaagcattgccagatgaaatatcatcgttttggcaagataatattcgtgtattatcattgaaagacaacaacgttactagcatacgtaatttgaaatcgatcacaaaattaaacaagctgagcatcttggatttagaggataataaaatacccaaagaagagcttgaccaagtacagagttatactccatttcatacgggcatccccaaagaagaatattgggcaattgcgatatcacgatatctaaaagatcatcctaacctacctactccagaacctaaaatatctagagcagcgaaaagaatgggattcataaatacgaacttgtctaatggagcaatgaatgaaaacaatataatttcacttgccccaagtgcaaatacaactataagtgcatctactgcaatggtctcatctaatcaaacctctgcaacatctttcagtggtacagtcaatgcagaatcagaacaaagtggggcagtgaatggtacggaactatacaatcacaccaaatataatgactacttcaagaggttgtcgattttaccagaagagtcaatgagtaacgggcatcaaaaaatatcgcatgcagagttggttgtttcctgtcggaagctcctatttagttttacagaatgccaacaagctatcagaaaaatcgcctctttctgtaaagagaaggccgtagcggttaatgtagtatcattattatactctgtcagatcacatactgataatctggtggaggtcttgcagcaaacagagaacgaagacgaatcgcatgatcaggcgttaatcaagctgtgcctcactatcatcacaaattttaaacaaattataacattgttgagaaaaaattttgagatttttttcaaagaagacgatctatgcttcataaggatgttttatatgacattaatgtgtgcttatatggaaatgtataatgcatggtcttttatcaaagaagatgatcaagtgtccggttctgcaagtaaggcacccaagaaacattctttttcgaggcacgagacatcgtccagtagtatcacaagcggtggaggacccgcagcaagtacgaccagtacacattgtagcggaaacataaaattactgccgaaaacaaggagcacaagaacaccatctgcatctgcattgctttcaaatagtaatattctgacgggtgataccactgctgttcctcttttatcaccaaatctaaatggtgcacacacccatggtccaattttgggacaccaaaatgcaataagcaatggaagttctcaaacgaacatgaatgaagtaaaaactactagcgatactattccaaggcaacagctgcttcagcacaataaatccatcagcgattcgaaaaaagagtcacaggcgcatgaacctaaacagcatccggttatgacttcttcaataattaacgcatcaaatagtaataacgtctcgaatgttaatataaccccaccaccgatgaatggtggtggtgccgcgaacagtagtgctaatgtagtggagacaaatattgacattcaactgtatcaaacgttgtccacagtagttaaaatggtgagcgttgtatataaccagttaacttcagagatatccaagatagccattgctagcaccatgggaaagcaaattttgacggactcgctagcacctaaaattcgtgatttgacggaaacatgtcgtcaagcgatggatttatccaaacaattgaatgaaaggttaaatgtattaataccgaacgattcaaattcagagaagtatctgacatctttggagaagctgaaaacgtgggagataatgaattcgttcttaaaagtaataatatcaattctggctaatactaaaatcgtaatgagcgacgtgcctaatttgaatgagctgagacctaacctagccaacttggcgaagattaccaaggatgtcactgtgatattggacttgagttcatacaaggctgtatcagtaagcgccaactctccggagtaa

SEQ ID NO: 10800 - DNA, 2376 bp, Artificial Sequence
  Description of Artificial Sequence: Synthetic polynucleotide
atggtagcgacatcttccaagaggacgttggatccgaaggaggaacatttgcctgctgacaaaacatccactaatagtagcaacactataatatctgagttggcaacacaagagaaatccagctctagtggtactacattaaaattaatagctcttaatatcaagtccatatctgatgaagatgtgggatatatccaaaatgttgaaagattatctttaaggaaaaatcacttaacatccttaccagcgagtttcaagaggttatctaggttacaatatttggatttgcataataacaattttaaagaaatcccatatattttgacacaatgccctcaattagagatcttggatttatcctccaatgagattgaagcattgccagatgaaatatcttctttttggcaagataatattcgtgtattatctttgaaagacaacaacgttactagcatacgtaatttgaaatctatcacaaaattaaacaagttgagcatcttggatttagaggataataaaatacccaaagaagagcttgaccaagtacagagttatactccatttcatacgggcatccccaaagaagaatattgggcaattgcgatatctagatatttgaaagatcatcctaacttgcctactccagaacctaaaatatctagagcagcgaaaagaatgggattcataaatacgaacttgtctaatggagcaatgaatgaaaacaatataatttctcttgccccaagtgcaaatacaactataagtgcatctactgcaatggtcagctctaatcaaacctctgcaacatctttcagtggtacagtcaatgcagaaagtgaacaaagtggggcagtgaatggtacggaattatacaatcacaccaaatataatgactacttcaagaggttgtctattttaccagaagagtccatgagtaacgggcatcaaaaaatatctcatgcagagttggttgtttcctgtagaaagctcttatttagttttacagaatgccaacaagctatcagaaaaatcgcctctttctgtaaagagaaggccgtagcggttaatgtagtatctttattatactctgtcagaagccatactgataatttggtggaggtcttgcagcaaacagagaacgaagacgaaagtcatgatcaggcgttaatcaagttgtgcctcactatcatcacaaattttaaacaaattataacattgttgagaaaaaattttgagatttttttcaaagaagacgatttatgcttcataaggatgttttatatgacattaatgtgtgcttatatggaaatgtataatgcatggtcttttatcaaagaagatgatcaagtgtccggttctgcaagtaaggcacccaagaaacattcttttagcaggcacgagacatcttccagtagtatcacaagcggtggaggacccgcagcaagtacgaccagtacacattgtagcggaaacataaaattattaccgaaaacaaggagcacaagaacaccatctgcatctgcattgctttctaatagtaatattttaacgggtgataccactgctgttcctcttttatctccaaatttgaatggtgcacacacccatggtccaattttgggacaccaaaatgcaataagcaatggaagttctcaaacgaacatgaatgaagtaaaaactactagcgatactattccaaggcaacagttacttcagcacaataaatccatcagcgattctaaaaaagagagccaggcgcatgaacctaaacagcatccggttatgacttcttctataattaacgcatctaatagtaataacgtctccaatgttaatataaccccaccaccgatgaatggtggtggtgccgcgaacagtagtgctaatgtagtggagacaaatattgacattcaattatatcaaacgttgtccacagtagttaaaatggtgagcgttgtatataaccagttaacttccgagatatccaagatagccattgctagcaccatgggaaagcaaattttgacggactctttggcacctaaaattcgtgatttgacggaaacatgtcgtcaagcgatggatttatccaaacaattgaatgaaaggttaaatgtattaataccgaacgattctaattctgagaagtatttgacatctttggagaagttgaaaacgtgggagataatgaattctttcttaaaagtaataatatctattttggctaatactaaaatcgtaatgagcgacgtgcctaatttgaatgagttaagacctaacttggccaacttggcgaagattaccaaggatgtcactgtgatattggacttgagtagttacaaggctgtatctgtaagcgccaactctccggagtga

SEQ ID NO: 10801 - DNA, 2079 bp, Saccharomyces cerevisiae
atgctttcccataatgctttaagggcctttgattgttcaaaggtgattatttcacgaagatgtctaacctcttcaacatcgatataccaacaaagcagcgttcacttacaagaaacagatgatggacattcaggaaatagagaaaagcacgtctcaccgtttgaaagggtacaaaatttggctgctgatttgaagaacgagttgaaagctccagattcagatatcaatgaagtttttaatgactttaaagataagattgaatcgttgaaacagaaattaaggaacccttcacctatggaaagatcacacttgttagcgaatttttcttcggatctcctacaggaattaagttacagaagcaaaaatatgacgctagatccttatcaagtattaaacacattgtgccaatacaaattggcacgctcacaacatttcacgattgttttaaagtaccttctatataatcaatcaccacaggacgttattgccttatgggtgaagtacttggaaaccatttccgaaaacccagtgatcttacttcaaaatagttcttctcgtgcacatatgcaaaatattgcaattaccaccattgcttacttatctttaccagagaatactgtggatatcaatattctgtataagattttacagatcgatcgtaaaatgggccaggttttaccttttaacatgattagaagaatgttaagtacagaatttagctctcttgaaagaagagacgtgattatcaaaaatctaaacactttgtactatcaatacacagtacaggatagtgatcatttcttaagtcaaattgaaaatgctcctagatggatagatttaagggatctttatggccaatacaataaacttgaaggtgagaaaaatgtagagatcataagcaagttcatggacaagtttattgatttggataaacccgaccaagttgttactatttataaccagtatagcaaggttttcccaaatagtacgtcgctgaaagattgtcttttaagagctgtgtcgcacttacgagctaaatcgagtaaagagaagttggacagaattctagcagtctggaacagtgttatcaaaccaggagataatattaaaaacacatcttatgcgacgctagttaacgcactaactgattctggaaatttcaaccatttaaaggaattttgggaagaagaacttcctaaaaagttcaagaaagatcccatcgtgaaggaagcatttctcctggccttatgtcaaacttcgcctctaaagtatgaccaagtcaaaggggagttagcagagactgttaaaaccaagaagttgttcaataaagttttattgctaatgttagatgatgaaaaagtgagcgaagaacaattcaacacattttactataaccattatccatcagatggtgtgttaccccctactttggatactctaagcattaaaatgtacgctaattataaatttcaggcagaagatacacgcccacaattcgatctattgcaaagtgtttccattaatcccaccgattatgaaaaggttgaaaagattacgaaagcctttatttcagtgtgccccactgtcgagccgattcgtcaactttacaaacaattgggaactcacttaaatgctaggaattatgcagactttatttccgcagagtttaataagcctgacggcacagtggccgaggcaaagaatttgttttctgattttctctcatatcaaaagactagaaagagaaacgtggataatacgcctctaaatgctttattattggggttctgtgataaactttacaagagtaaacatagcgagtacgttccctacatcgaaaagtactacaatctagctaaggattcaagtatcagggtgtcgaacttggccgtttcgaaaattctattcaacttggccacatttgcacgcaatactcagcagttatctgacaaagaggttgcttttattaaccagtttatgcgagatttaggcactaatgagggttttcgtcccaaccctaaggatattcaaattttaaaagaatgtgatggaattactgttccagaaaagttgacttaa

SEQ ID NO: 10802 - DNA, 2079 bp, Artificial Sequence
  Description of Artificial Sequence: Synthetic polynucleotide
atgctttcccataatgctttaagggcctttgattgttccaaggtgattatttctagaagatgtttgacctcttctacatctatataccaacaaagcagcgttcacttacaagaaacagatgatggacattctggaaatagagaaaagcacgtctctccgtttgaaagggtacaaaatttggctgctgatttgaagaacgagttgaaagctccagattctgatatcaatgaagtttttaatgactttaaagataagattgaatctttgaaacagaaattaaggaacccttctcctatggaaagaagtcacttgttagcgaatttttcttctgatctcttacaggaattaagttacagaagcaaaaatatgacgttagatccttatcaagtattaaacacattgtgccaatacaaattggcacgctctcaacatttcacgattgttttaaagtaccttttatataatcaatctccacaggacgttattgccttatgggtgaagtacttggaaaccatttccgaaaacccagtgatcttacttcaaaatagttcttctcgtgcacatatgcaaaatattgcaattaccaccattgcttacttatctttaccagagaatactgtggatatcaatattctttataagattttacagatcgatcgtaaaatgggccaggttttaccttttaacatgattagaagaatgttaagtacagaatttagctctcttgaaagaagagacgtgattatcaaaaatttgaacactttgtactatcaatacacagtacaggatagtgatcatttcttaagtcaaattgaaaatgctcctagatggatagatttaagggatctttatggccaatacaataaacttgaaggtgagaaaaatgtagagatcataagcaagttcatggacaagtttattgatttggataaacccgaccaagttgttactatttataaccagtatagcaaggttttcccaaatagtacgtccttgaaagattgtcttttaagagctgtgtctcacttaagagctaaatctagtaaagagaagttggacagaattttggcagtctggaacagtgttatcaaaccaggagataatattaaaaacacatcttatgcgacgttagttaacgcattgactgattctggaaatttcaaccatttaaaggaattttgggaagaagaacttcctaaaaagttcaagaaagatcccatcgtgaaggaagcatttctcttggccttatgtcaaacttctcctttgaagtatgaccaagtcaaaggggagttagcagagactgttaaaaccaagaagttgttcaataaagttttattgttgatgttagatgatgaaaaagtgagcgaagaacaattcaacacattttactataaccattatccaagtgatggtgtgttaccccctactttggatactttaagcattaaaatgtacgctaattataaatttcaggcagaagatacacgcccacaattcgatttattgcaaagtgtttccattaatcccaccgattatgaaaaggttgaaaagattacgaaagcctttatttctgtgtgccccactgtcgagccgattcgtcaactttacaaacaattgggaactcacttaaatgctaggaattatgcagactttatttccgcagagtttaataagcctgacggcacagtggccgaggcaaagaatttgttttctgattttctctcttatcaaaagactagaaagagaaacgtggataatacgcctttaaatgctttattattggggttctgtgataaactttacaagagtaaacatagcgagtacgttccctacatcgaaaagtactacaatttggctaaggattctagtatcagggtgtctaacttggccgtttccaaaattcttttcaacttggccacatttgcacgcaatactcagcagttatctgacaaagaggttgcttttattaaccagtttatgagagatttaggcactaatgagggttttcgtcccaaccctaaggatattcaaattttaaaagaatgtgatggaattactgttccagaaaagttgacttga

SEQ ID NO: 10803 - DNA, 1569 bp, Saccharomyces cerevisiae
atggcattggcaaattccagacctttgcaaataccaactttagagaatgaaattcttcataactcaaattctccagtatttcagttgaattcaatgggatttacaactagagctgacactatttcgaatccaggcacggatcttatcggcaaccagccaggcatggcccttgatgataataatttggccggttcttcgttttcctcatctcaggaaataaaagctaccaaacctaagaaggactttggtgctcccaaaaaagacaatccattattagaaatttctaagctaatacctgttactggtgagaggccaaaacccgaaaatagagactcccctctggatgatgacgttcttcacgcagtttttttaatattatgggaaatggatccgaatcaacaaggcatgaccgtcaaacaactgtgtgacttgcttttgcaaaaacatccagatatgtccaatttatcaaccaagttgtcaaatttaatttccgcaaaactgaacgcttatgttaaaaaaattgaaaaaggtgagaaaacgttaacttatgctttatcaagggaatggtctaattcatctcctagaaggatgctctatatatacagaggcatattatctcccgattacaaggagcatgctcaagctgttacgatgcaacttaaacaacaattggagacctccggtgatacaagcgactttaattcaaatggcaagaaaaaaagggagtccagcagtaaccagctagttaacaatgacagttattcaagttctatgacggacatgaaaaatatgtcttctaacagttccttctcaaaaaatttgaatgtagggaatctggccttttcattaagtccagaattcaacataccttattccacttctccagtgtcactaaatctttccccatcgatgagtaataatcagcaacaattactgacacctaattcggcatcgaagagtaaaaacaataataaaaaaagaaattacatggatgaagatactaacgagtcaatgaccgagccaaagaaaaccaaaactactaaacctggcaaacaaacaaaatcccaatctttatcagttttatccacccccaaaaagggttcctctgcatctctttctacatttgcaagctccaagaatatttcgccagattcttctctgtcgcataatgcatcgtcaaatacttatgttactgccgctgccgctgcaccaaggctttctaagcttttgccgaaaaatgggtttaagaaaaattcacgtagctcttctgaactggctgctatccataaagtaatctctacacagactccaattgagagctcttcagagagctctcaatataacagtagtagtagttcaccagttaatagtgcagctgcttcttctgctgaatctttatccgacatcaattccagtcaggataacggaagagaatcaaacccaagttcccaagaatcacgaaacgaagttacgaattggatgaaaattgtgagaaatggatttttgacacatgatattgaatctcctgaatcaatcacattagatgacctagaaaatatattcaattga

SEQ ID NO: 10804 - DNA, 1569 bp, Artificial Sequence
  Description of Artificial Sequence: Synthetic polynucleotide
atggcattggcaaattccagacctttgcaaataccaactttagagaatgaaattcttcataacagtaattctccagtatttcagttgaattctatgggatttacaactagagctgacactatttctaatccaggcacggatcttatcggcaaccagccaggcatggcccttgatgataataatttggccggttcttctttttcctcttctcaggaaataaaagctaccaaacctaagaaggactttggtgctcccaaaaaagacaatccattattagaaatttctaagttaatacctgttactggtgagaggccaaaacccgaaaatagagactcccctttggatgatgacgttcttcacgcagtttttttaatattatgggaaatggatccgaatcaacaaggcatgaccgtcaaacaattatgtgacttgcttttgcaaaaacatccagatatgtccaatttatctaccaagttgagcaatttaatttccgcaaaattgaacgcttatgttaaaaaaattgaaaaaggtgagaaaacgttaacttatgctttatctagggaatggtctaattcttctcctagaaggatgctctatatatacagaggcatattatctcccgattacaaggagcatgctcaagctgttacgatgcaacttaaacaacaattggagacctccggtgatacaagcgactttaatagtaatggcaagaaaaaaagggagtccagcagtaaccagttggttaacaatgacagttattctagttctatgacggacatgaaaaatatgtcttctaacagttccttctccaaaaatttgaatgtagggaatttggccttttctttaagtccagaattcaacataccttattccacttctccagtgtctttgaatctttccccaagcatgagtaataatcagcaacaattattaacacctaattctgcatccaagagtaaaaacaataataaaaaaagaaattacatggatgaagatactaacgagtccatgaccgagccaaagaaaaccaaaactactaaacctggcaaacaaacaaaatcccaatctttaagtgttttatccacccccaaaaagggttcctctgcatctctttctacatttgcaagctccaagaatatttctccagattcttctttatctcataatgcatcttccaatacttatgttactgccgctgccgctgcaccaaggctttctaagcttttgccgaaaaatgggtttaagaaaaattctcgtagctcttctgaattggctgctatccataaagtaatctctacacagactccaattgagagctcttctgagagctctcaatataacagtagtagtagttctccagttaatagtgcagctgcttcttctgctgaatctttatccgacatcaattccagtcaggataacggaagagaatctaacccaagttcccaagaatctagaaacgaagttacgaattggatgaaaattgtgagaaatggatttttgacacatgatattgaatctcctgaaagtatcacattagatgacttggaaaatatattcaattga

SEQ ID NO: 10805 - DNA, 1896 bp, Saccharomyces cerevisiae
atgattaagttcactaacgagaacttaattagagggatccgaatgacgatttccgcaaaatctcgtcatttggctctagggacagatatgacgagaaagtttagcttgtcgtgtaggtttttgaacaaagcaaatcttactgaagaagagaaagagttgttaaatgaaccaagggcgcgcgactatgtggatgtttgtatagttggaggagggcctgcgggattagcaacagcaatcaaattaaaacagttagacaattcgtcaggaacaggccaattgcgtgtcgttgttcttgaaaaatccagtgtattgggtggacaaactgtttccggcgctatattggaaccgggagtgtggaaagaactattccctgatgaaaagtctgacattggcattccgttaccaaaggagttagctacgttggtaactaaagaacatttgaaatttttaaaggggaaatgggcgatcagcgttccagaaccatctcaaatgatcaataaaggacgtaattatattgtctctttgaaccaagtcgtcggatatttaggagaaaaggcagaagaagtaggagttgaagtttaccccggaatagctgtctcggatctcatatatgatgaaaacaacgccgttaagggtgtaattactaaagatgctggtatttcgaagtccggtaagcctaaggaaaccttcgaacgtgggatggaattttgggctagacaaactgtattagcagagggctgtcatggttccttaacaaaacaagccttggcaaaatatgatttaagaaaaggcagacagcaccaaacttatggattaggtattaaagaagtttgggaagtcaagccggagaattttaacaagggatttgcagctcataccatggggtacccgttgacaaatgatgtttatggcggtggtttccagtaccattttggtgatgggctggtcactgtgggccttgtcgtggggttagattataagaatccctatgtttcaccttacaaagagtttcaaaagatgaaacatcatccatactattcaaaagttttagaaggaggtaagtgtatcgcttatgctgcaagagcattgaatgaaggtggactgcaatctgtacccaagttgaatttccctggtggtgttttggtaggggctagcgcgggtttcatgaacgttccaaagatcaagggtactcatactgcgatgaagagtggattacttgccgctgaaagtatctttgagtccataaaagggttacctgtcttagaagaggttgaagacgaagacgccaaaatggctatgtttgataaggaggcaactattaacttggaatcatatgaaagtgcattcaaagaatcatcgatatataaggaactatacgaagtgcgtaatattagaccgtccttcagcgggaaacttggtggatatggtggtatgatctactctggaatcgattctttgatattgaagggaaaagttccgtggacactgaaatttgatgaaaaaaatgacggtgaaattttggaacctgcttccaagtacaaaccgatagaataccccaagcctgatggtgtgatatcctttgatatattgacctccgtgtctagaaccggaacctaccatgatgatgatgaaccatgtcacttgagggttcctggacaagatatggtaaagtacgccgagagaagctttcccgtttggaaaggtgttgaatcgaggttctgcccagcaggtgtctacgaattcgtcaaagatgaaaaatcgcctgtgggtacgagactgcaaatcaattcacaaaattgtatccattgcaagacctgtgatattaaggcgcccagacaagatattacttggaaagtacccgaaggtggagatggaccaaagtacacgctaacttaa

SEQ ID NO: 10806 - DNA, 1896 bp, Artificial Sequence
  Description of Artificial Sequence: Synthetic polynucleotide
atgattaagttcactaacgagaacttaattagagggatcagaatgacgatttccgcaaaatctcgtcatttggctttagggacagatatgacgagaaagtttagcttgagttgtaggtttttgaacaaagcaaatcttactgaagaagagaaagagttgttaaatgaaccaagggcgcgcgactatgtggatgtttgtatagttggaggagggcctgcgggattagcaacagcaatcaaattaaaacagttagacaattcttctggaacaggccaattgcgtgtcgttgttcttgaaaaatccagtgtattgggtggacaaactgtttccggcgctatattggaaccgggagtgtggaaagaattattccctgatgaaaagtctgacattggcattccgttaccaaaggagttagctacgttggtaactaaagaacatttgaaatttttaaaggggaaatgggcgatcagcgttccagaaccatctcaaatgatcaataaaggacgtaattatattgtctctttgaaccaagtcgtcggatatttaggagaaaaggcagaagaagtaggagttgaagtttaccccggaatagctgtctctgatctcatatatgatgaaaacaacgccgttaagggtgtaattactaaagatgctggtatttccaagtccggtaagcctaaggaaaccttcgaacgtgggatggaattttgggctagacaaactgtattagcagagggctgtcatggttccttaacaaaacaagccttggcaaaatatgatttaagaaaaggcagacagcaccaaacttatggattaggtattaaagaagtttgggaagtcaagccggagaattttaacaagggatttgcagctcataccatggggtacccgttgacaaatgatgtttatggcggtggtttccagtaccattttggtgatgggttagtcactgtgggccttgtcgtggggttagattataagaatccctatgtttctccttacaaagagtttcaaaagatgaaacatcatccatactattctaaagttttagaaggaggtaagtgtatcgcttatgctgcaagagcattgaatgaaggtggattacaatctgtacccaagttgaatttccctggtggtgttttggtaggggctagcgcgggtttcatgaacgttccaaagatcaagggtactcatactgcgatgaagagtggattacttgccgctgaaagtatctttgagtccataaaagggttacctgtcttagaagaggttgaagacgaagacgccaaaatggctatgtttgataaggaggcaactattaacttggaaagttatgaaagtgcattcaaagaaagtagtatatataaggaattatacgaagtgcgtaatattagaccgtccttcagcgggaaacttggtggatatggtggtatgatctactctggaatcgattctttgatattgaagggaaaagttccgtggacattaaaatttgatgaaaaaaatgacggtgaaattttggaacctgcttccaagtacaaaccgatagaataccccaagcctgatggtgtgatatcctttgatatattgacctccgtgtctagaaccggaacctaccatgatgatgatgaaccatgtcacttgagggttcctggacaagatatggtaaagtacgccgagagaagctttcccgtttggaaaggtgttgaaagtaggttctgcccagcaggtgtctacgaattcgtcaaagatgaaaaatctcctgtgggtacgagattacaaatcaattctcaaaattgtatccattgcaagacctgtgatattaaggcgcccagacaagatattacttggaaagtacccgaaggtggagatggaccaaagtacacgttgacttga

SEQ ID NO: 10807 - DNA, 489 bp, Saccharomyces cerevisiae
atgccaagagaattcaaatcctttgggtctacagaaaagtctttgctgtcaaaaggacatggagagcctagttacagcgaaatatacgctgagcctgagaactttttagagattgaggtgcacaaccctaaaactcatataccaaatgggatggattcgaaggggatgtttacagattacgaaataatatgccgtacaaacttgccaagttttcacaagagggtatcgaaagtaaggagacgatactcagactttgaattcttccgcaaatgcttgatcaaggaaatttctatgcttaatcacccaaaagtcatggtacctcatttaccgggtaaaattctcttgagtaatagatttagtaacgaagtcattgaagagaggagacaaggtttgaatacctggatgcaatcggtagccgggcacccgcttttacaatctggttctaaagttctcgtgaggttcattgaagctgaaaagtttgtcggctga

SEQ ID NO: 10808 - DNA, 489 bp, Artificial Sequence
  Description of Artificial Sequence: Synthetic polynucleotide
atgccaagagaattcaaatcctttgggtctacagaaaagtctttgttatccaaaggacatggagagcctagttacagcgaaatatacgctgagcctgagaactttttagagattgaggtgcacaaccctaaaactcatataccaaatgggatggattctaaggggatgtttacagattacgaaataatatgccgtacaaacttgccaagttttcacaagagggtatccaaagtaaggagaagatacagtgactttgaattcttccgcaaatgcttgatcaaggaaatttctatgcttaatcacccaaaagtcatggtacctcatttaccgggtaaaattctcttgagtaatagatttagtaacgaagtcattgaagagaggagacaaggtttgaatacctggatgcaaagtgtagccgggcacccgcttttacaatctggttctaaagttctcgtgaggttcattgaagctgaaaagtttgtcggctga

SEQ ID NO: 10809 - DNA, 729 bp, Saccharomyces cerevisiae
atgactgataggaatttctcaccacaacaaggacaaggacctcaagaatcgctcccggagggaccgcaacccagtacgatgattcagagagaggaaatgaatatgccaaggcaatattcagaacagcaacaactgcaagaaaacgaaggggaaggggaaaatacgaggctacctgtttctgaggaagagttccggatggtacaggagttgcaagctatccaggcgggccatgaccaagctaatctaccgccaagtggtcgaggatcgcttgaaggcgaagataatggaaacagcgacggcgcagacggagaaatggacgaggacgatgaagagtatgatgtgtttaggaacgttggtcagggattggtgggccactacaaggagataatgatccgttattggcaagaattaatcaacgagatcgagtctacgaatgaacctggttccgagcatcaagatgacttcaaatcacattccttaccatttgcgagaatccgcaaggtcatgaagacggatgaagatgtcaagatgattagtgcagaggcccccatcattttcgccaaagcctgtgagatctttattacagaactgactatgagagcttggtgcgtggcagaaaggaataaaagacgaactttgcagaaggcagatatcgcagaggccctgcaaaagagtgacatgtttgactttctcatcgatgttgtgcctagaagacctcttccacaatga

SEQ ID NO: 10810 - DNA, 729 bp, Artificial Sequence
  Description of Artificial Sequence: Synthetic polynucleotide
atgactgataggaatttctctccacaacaaggacaaggacctcaagaatctctcccggagggaccgcaacccagtacgatgattcagagagaggaaatgaatatgccaaggcaatattctgaacagcaacaattacaagaaaacgaaggggaaggggaaaatacgaggttgcctgtttctgaggaagagttccgcatggtacaggagttgcaagctatccaggcgggccatgaccaagctaatttaccgccaagtggtagaggatctcttgaaggcgaagataatggaaacagcgacggcgcagacggagaaatggacgaggacgatgaagagtatgatgtgtttaggaacgttggtcagggattggtgggccactacaaggagataatgatccgttattggcaagaattaatcaacgagatcgagtctacgaatgaacctggttccgagcatcaagatgacttcaaatctcattccttaccatttgcgagaatccgcaaggtcatgaagacggatgaagatgtcaagatgattagtgcagaggcccccatcattttcgccaaagcctgtgagatctttattacagaattgactatgagagcttggtgcgtggcagaaaggaataaaagaagaactttgcagaaggcagatatcgcagaggccttgcaaaagagtgacatgtttgactttctcatcgatgttgtgcctagaagacctcttccacaatga

SEQ ID NO: 10811 - DNA, 1572 bp, Saccharomyces cerevisiae
atgaaacatccgtatgaggaattccccacaggttccaagtcaccatataacatgtctagaggagctcatccaggcgccgttttgctatcaccacaatcttctgccataaacaagaacaatccgggcagcaattctggcaataaccagggcaattcatccgtgaccgcgaatgttttgtcccctcaatcccatagtatgtcactcaatgacatgcttgatcagcaatcctttatgctagacactgcgggaaccagggctcagccgctccagcaacaacagcagcagcaacaacagcaacagcaggcgtcgttgccttcccttaatattcaaacagtttcgtctacagcagctggttctgctatcgtttcccccatgatgcaatctccaaaggcgttgcaatctactttatcttcaacatctatgtatttggattcatttcagagatctccaaataatattttgggtattccatcgcagagtggttcaattcctttgccgcaatcccgtcaatcgcaacaacagtctcaatcccaaaaaaacgatccgaacatgggcaccaatttcagccaagacatcaaccaattatgttcttggatatccatgctgaacagcagccaacaaaatactgtaatggacaatatcctttccattttgaatgatgatgttttgaaatatactaagttaaaaatagagactttgacaaacactcccttcatctccccaccgctacctgcaattgcatcacctatacctaatagggatgacacacaaattttgaatattgattcagtcttttcttcaagtcctataactaatgaccctgaaaataccgataacttgttgtatcaaaattggtcccctcagccacattcaataccaattagccaacccatatatgacaacatcaccgacgctagtcaaaggtccaagtcggctgagcctcatgttaattcaagcccaaatctcattcctgtccagaaacaattcaacaacggtaacagtaccaaatataaaaagttgccatcagagaatcccaactatctttctcactctctctcaagttcccattcttttttccaaccaaagaaaaggtctaacatgggaaatgagtacaattctcatcaccatcattcattgcatcatcctctgcataataccacctcatatttttcgaatacttcaagaccatcaggaactgatttgaataagtccaaccagaacgtgttcaataataccattacgcatcctaatgctggtcctacaagtgccacatcgacatctacatcatctaacggaaacactcctttatcgagtaactcttcgatgaatccaaagagtttgacagaccccaagctactaaaaaatatacccatgtggttaaaatcgttaagactacacaagtattcagatgccttaagcggaaccccgtggatcgaattgatttacttagatgacgagactttagaaaaaaaaggcgttcttgccttgggtgcaaggagaaaattgttgaaggcttttggaatcgttattgattacaaagaacgtgatttaattgatagatctgcttattaa

SEQ ID NO: 10812 - DNA, 1572 bp, Artificial Sequence
  Description of Artificial Sequence: Synthetic polynucleotide
atgaaacatccgtatgaggaattccccacaggttccaagtctccatataacatgtctagaggagctcatccaggcgccgttttgttatctccacaatcttctgccataaacaagaacaatccgggcagcaattctggcaataaccagggcaattcttccgtgaccgcgaatgttttgtcccctcaatcccatagtatgagtctcaatgacatgcttgatcagcaatcctttatgttggacactgcgggaaccagggctcagccgctccagcaacaacagcagcagcaacaacagcaacagcaggcgtctttgccttcccttaatattcaaacagtttcttctacagcagctggttctgctatcgtttcccccatgatgcaatctccaaaggcgttgcaatctactttatcttctacatctatgtatttggattcttttcagagatctccaaataatattttgggtattccatctcagagtggttccattcctttgccgcaatcccgtcaatctcaacaacagtctcaatcccaaaaaaacgatccgaacatgggcaccaatttcagccaagacatcaaccaattatgttcttggatatccatgttgaacagcagccaacaaaatactgtaatggacaatatcctttccattttgaatgatgatgttttgaaatatactaagttaaaaatagagactttgacaaacactcccttcatctccccaccgttgcctgcaattgcatctcctatacctaatagggatgacacacaaattttgaatattgattctgtcttttcttccagtcctataactaatgaccctgaaaataccgataacttgttgtatcaaaattggtcccctcagccacattccataccaattagccaacccatatatgacaacatcaccgacgctagtcaaaggtccaagtctgctgagcctcatgttaatagtagcccaaatctcattcctgtccagaaacaattcaacaacggtaacagtaccaaatataaaaagttgccaagtgagaatcccaactatctttctcactctctctccagttcccattcttttttccaaccaaagaaaaggtctaacatgggaaatgagtacaattctcatcaccatcattctttgcatcatcctttgcataataccacctcttatttttctaatacttccagaccatctggaactgatttgaataagtccaaccagaacgtgttcaataataccattacgcatcctaatgctggtcctacaagtgccacatctacatctacatcttctaacggaaacactcctttatccagtaactcttctatgaatccaaagagtttgacagaccccaagttattgaaaaatatacccatgtggttaaaatctttaagattgcacaagtattctgatgccttaagcggaaccccgtggatcgaattgatttacttagatgacgagactttagaaaaaaaaggcgttcttgccttgggtgcaaggagaaaattgttgaaggcttttggaatcgttattgattacaaagaacgtgatttaattgatagatctgcttattga

SEQ ID NO: 10813 - DNA, 1581 bp, Saccharomyces cerevisiae
atgtccaccctttttctgattggaatacacgagattgagaaatctcaaacaattgtacagaatgaacactattttgatagagtgattgagcttcaagatttggattctctgatggtagcattgtataaggacagagtttcgccttttccaaacgtccataactttgaaacgggcgtatctatagttctttatgacccttcaaaatttcaattatctgtgcgacaattggatgttctattcaagcgatttttcccatctttcaatatttctgcgatagatcatacacgagaggaaaacctgcaacgtcttgaatgtgttgagcgtgaaaatagcatctgtcgtaatagaataacgagaattaaccactggatgtatcaccatcatgatgatactccagacggtattaacaaaaacagctatggtactgtaaatgggaattctgtccccactcaagcatgtgaagcaaacatttacactttattattgcatttgaatgattccaaggcacaacatttacgaaaggcatcagtgccaaggctaattcgcaacatcgagtttatgtcttttttgtcagatccaatagaaaaaatttctcaagagggatcacattattggaacattctatcaacttgggacttttgtgctttatcattaagcactcaagaattgatttggtgcgggttcacgcttatcaaaaagttatctaaggatgcaaaagtactcattgcagataataagttactgctactactatttactttagaatcatcctatcatcaagttaacaaatttcacaattttaggcatgccatcgatgtcatgcaagccacatggcgattgtgtacatatcttcttaaagataatcctgtacaaacattactgttgtgtatggctgccataggtcatgatgtcggtcatcctgggactaacaatcaactattgtgcaactgtgaatcagaggttgctcaaaatttcaaaaatgtctctatcttggagaattttcacagggaattatttcaacaattgctatcagagcattggcctcaattgctatctatctccaaaaaaaaatttgattttatttccgaggctattctggccacagatatggcattgcattctcagtatgaggatagattaatgcatgaaaacccaatgaaacaaatcactttgatatctctaattattaaagctgcagacatctctaatgtgacgagaaccttgtcaatatcagcacgttgggcatacctcattactctcgaatttaatgattgcgctcttttggaaacatttcataaagctcaccgcccagaacaagactgttttggcgattcatacaagaatgttgattctccgaaagaagatttggaatcaattcaaaatattttggtgaacgtaacagaccctgatgatattatcaaagaccatccgcatattccaaacggtcaaatatttttcattaatacgtttgctgaagtatttttcaacgcattaagtcaaaaattctcaggattaaaatttttaagcgataatgtcaaaatcaataaagaatactggatgaaacacaagaaaccacaatag

SEQ ID NO: 10814 - DNA, 1581 bp, Artificial Sequence
  Description of Artificial Sequence: Synthetic polynucleotide
atgtccaccctttttttgattggaatacacgagattgagaaatctcaaacaattgtacagaatgaacactattttgatagagtgattgagcttcaagatttggattctttgatggtagcattgtataaggacagagtttctccttttccaaacgtccataactttgaaacgggcgtatctatagttctttatgacccttccaaatttcaattatctgtgagacaattggatgttttgttcaagagatttttcccatctttcaatatttctgcgatagatcatacaagagaggaaaacttacaacgtcttgaatgtgttgagcgtgaaaatagcatctgtcgtaatagaataacgagaattaaccactggatgtatcaccatcatgatgatactccagacggtattaacaaaaacagctatggtactgtaaatgggaattctgtccccactcaagcatgtgaagcaaacatttacactttattattgcatttgaatgattccaaggcacaacatttaagaaaggcatctgtgccaaggttgattcgcaacatcgagtttatgtcttttttgagtgatccaatagaaaaaatttctcaagagggatctcattattggaacattttatctacttgggacttttgtgctttatctttaagcactcaagaattgatttggtgcgggttcacgcttatcaaaaagttatctaaggatgcaaaagtactcattgcagataataagttattattattactttttactttagaatcttcctatcatcaagttaacaaatttcacaattttaggcatgccatcgatgtcatgcaagccacatggagattgtgtacatatcttcttaaagataatcctgtacaaacattattattgtgtatggctgccataggtcatgatgtcggtcatcctgggactaacaatcaattattgtgcaactgtgaaagtgaggttgctcaaaatttcaaaaatgtctctatcttggagaattttcacagggaattatttcaacaattgttatctgagcattggcctcaattgttatctatctccaaaaaaaaatttgattttatttccgaggctattttagccacagatatggcattgcattctcagtatgaggatagattaatgcatgaaaacccaatgaaacaaatcactttgatatctttgattattaaagctgcagacatctctaatgtgacgagaaccttgagcatatctgcacgttgggcatacctcattactctcgaatttaatgattgcgctcttttggaaacatttcataaagctcaccgcccagaacaagactgttttggcgattcttacaagaatgttgattctccgaaagaagatttggaaagtattcaaaatattttggtgaacgtaacagaccctgatgatattatcaaagaccatccgcatattccaaacggtcaaatatttttcattaatacgtttgctgaagtatttttcaacgcattaagtcaaaaattcagtggattaaaatttttaagcgataatgtcaaaatcaataaagaatactggatgaaacacaagaaaccacaatga

SEQ ID NO: 10815 - DNA, 2292 bp, Saccharomyces cerevisiae
atgaaaaattttcttccacgcacattgaaaaatatttacgaattatatttcaataacatctcagtacatagtatagtatctcgcaacacacagctcaaaaggtcaaagataattcaaatgactaccgagactttcgaagacattaagctagaggacatccctgttgacgacattgatttttccgacctggaagaacaatacaaggtcactgaagaattcaatttcgatcagtacatcgtcgttaatggtgccccagtcatcccatccgccaaagttcctgttttgaaaaaggctttgacttctttgttttccaaagctggtaaagttgttaacatggaatttccaattgatgaagccactggtaagacgaaaggttttctcttcgtggaatgtggctcaatgaacgatgctaaaaaaattatcaagagtttccacggtaaaagactggatttaaaacatcgtttgtttctttatactatgaaagatgttgaaagatataattctgacgactttgacaccgaattcagggagcctgatatgcctacattcgttccatctagttccttaaaatcctggttaatggacgacaaagtgagagatcagtttgtattacaagatgacgtgaagactagtgtgttctggaactctatgttcaatgaagaagattctttggtggaatctagagagaactggtctaccaattatgttagattctccccaaagggtacctatttgttttcttaccatcaacagggtgtaactgcatggggtggtccaaacttcgatcgtttgagaagattctatcatccagatgtaagaaactcttccgtctctccgaatgaaaagtacctggtcactttctccacggaaccaatcattgtagaagaagataacgaattctctccatttaccaagaaaaatgagggtcatcaattatgcatctgggacattgcttctggtctgttgatggcaactttcccagtgataaagagcccatatctgaaatggcctttagttagatggtcttataatgataaatattgtgctcgtatggttggagacagtttaatagttcacgatgctactaaaaacttcatgccattagaagctaaggctttgaagccttctggtattagagatttctcatttgctccagaaggtgttaaattacaaccattcagaaacggtgacgagccttctgttttattggcttattggactcctgagactaataattccgcttgtactgctaccattgctgaagttcctcgcggtagagtgctaaaaaccgttaacttagttcaagtctccaacgtaactctgcactggcaaaaccaagctgagttcctgtgcttcaatgtcgaacgtcacacaaagtctggtaagactcaattcagtaatctacaaatttgtaggttgactgaaagagatataccagttgaaaaggttgaattgaaagatagtgtctttgaattcggttgggaaccccacggaaatagatttgttacaatttctgttcatgaagtagctgatatgaattatgctatcccagcaaatacaatcagattttacgctccagaaactaaagaaaagactgacgtaattaaaagatggagcttggtcaaagaaattccaaaaacttttgccaacactgtttcttggtctccagcgggtagatttgtggttgtaggtgctttagtgggtccaaacatgcgtagatcagacctacaattttacgatatggactatccaggtgaaaagaatattaatgacaataatgatgtttcagcttctttgaaagatgttgctcatcctacctactctgcggctactaatatcacttgggatccatctggtagatacgttaccgcatggtcaagttctttgaaacacaaggtggagcatggttacaaaattttcaatattgctggtaacttagttaaagaagacatcattgctggcttcaagaactttgcctggagaccaaggccagcttccattttgtctaacgccgaaaggaaaaaggttaggaaaaacttgagggaatggtctgcccaattcgaagagcaagatgcaatggaagctgacaccgccatgagagatttgattctacaccaacgtgaattattgaagcaatggaccgaatatagagaaaaaattggccaagaaatggaaaaatctatgaatttcaaaatctttgacgttcaaccagaagatgccagcgatgactttaccaccatcgaagagatagttgaagaagttttggaagaaacaaaggaaaaggtcgaataa

SEQ ID NO: 10816 - DNA, 2292 bp, Artificial Sequence
  Description of Artificial Sequence: Synthetic polynucleotide
atgaaaaattttcttccacgcacattgaaaaatatttacgaattatatttcaataacatctctgtacatagtatagtatctcgcaacacacagctcaaaaggtctaagataattcaaatgactaccgagactttcgaagacattaagttggaggacatccctgttgacgacattgatttttccgacttggaagaacaatacaaggtcactgaagaattcaatttcgatcagtacatcgtcgttaatggtgccccagtcatcccatccgccaaagttcctgttttgaaaaaggctttgacttctttgttttccaaagctggtaaagttgttaacatggaatttccaattgatgaagccactggtaagacgaaaggttttctcttcgtggaatgtggctctatgaacgatgctaaaaaaattatcaagagtttccacggtaaaagattagatttaaaacatcgtttgtttctttatactatgaaagatgttgaaagatataattctgacgactttgacaccgaattcagggagcctgatatgcctacattcgttccatctagttccttaaaatcctggttaatggacgacaaagtgagagatcagtttgtattacaagatgacgtgaagactagtgtgttctggaactctatgttcaatgaagaagattctttggtggaatctagagagaactggtctaccaattatgttagattctccccaaagggtacctatttgttttcttaccatcaacagggtgtaactgcatggggtggtccaaacttcgatcgtttgagaagattctatcatccagatgtaagaaactcttccgtctctccgaatgaaaagtacttagtcactttctccacggaaccaatcattgtagaagaagataacgaattctctccatttaccaagaaaaatgagggtcatcaattatgcatctgggacattgcttctggtttattgatggcaactttcccagtgataaagagcccatatttgaaatggcctttagttagatggtcttataatgataaatattgtgctcgtatggttggagacagtttaatagttcacgatgctactaaaaacttcatgccattagaagctaaggctttgaagccttctggtattagagatttctcctttgctccagaaggtgttaaattacaaccattcagaaacggtgacgagccttctgttttattggcttattggactcctgagactaataattccgcttgtactgctaccattgctgaagttcctcgcggtagagtgttgaaaaccgttaacttagttcaagtctccaacgtaactttgcactggcaaaaccaagctgagttcttgtgcttcaatgtcgaacgtcacacaaagtctggtaagactcaattcagtaatttacaaatttgtaggttgactgaaagagatataccagttgaaaaggttgaattgaaagatagtgtctttgaattcggttgggaaccccacggaaatagatttgttacaatttctgttcatgaagtagctgatatgaattatgctatcccagcaaatacaatcagattttacgctccagaaactaaagaaaagactgacgtaattaaaagatggagcttggtcaaagaaattccaaaaacttttgccaacactgtttcttggtctccagcgggtagatttgtggttgtaggtgctttagtgggtccaaacatgcgtagaagtgacttgcaattttacgatatggactatccaggtgaaaagaatattaatgacaataatgatgtttctgcttctttgaaagatgttgctcatcctacctactctgcggctactaatatcacttgggatccatctggtagatacgttaccgcatggtctagttctttgaaacacaaggtggagcatggttacaaaattttcaatattgctggtaacttagttaaagaagacatcattgctggcttcaagaactttgcctggagaccaaggccagcttccattttgtctaacgccgaaaggaaaaaggttaggaaaaacttgagggaatggtctgcccaattcgaagagcaagatgcaatggaagctgacaccgccatgagagatttgattttacaccaacgtgaattattgaagcaatggaccgaatatagagaaaaaattggccaagaaatggaaaaatctatgaatttcaaaatctttgacgttcaaccagaagatgccagcgatgactttaccaccatcgaagagatagttgaagaagttttggaagaaacaaaggaaaaggtcgaatga

SEQ ID NO: 10817 - DNA, 867 bp, Saccharomyces cerevisiae
atgacatcaattggtactggttacgatctttccaatagtgttttttcccccgatggtagaaatttccaagtagagtatgccgtcaaagcagtcgaaaacggtaccacatcaatcggtataaagtgtaacgacggtgtagtctttgcagtggaaaagctcattacgtctaaactgctggtcccacaaaaaaatgtcaagattcaagtcgtagaccgtcacatcggttgcgtttattcaggtttgattcctgatggtaggcacctggttaatcgtggtcgtgaagaagccgccagcttcaaaaagctgtataaaacgcccattcccattcctgcatttgcagaccgtttaggacaatatgtgcaggcgcacactttatacaacagtgttagaccgttcggggtcagtaccatctttggtggtgtagataaaaatggtgctcatctttacatgttggaaccaagtggctcttattggggctacaagggggctgccactgggaaaggtaggcaatctgcgaaggctgaattggaaaaattagttgaccatcatccagaaggtctttcagcaagagaggccgttaaacaagctgcaaagattatctatttggcacacgaggataacaaggaaaaggattttgaattggaaataagttggtgttcactgtcggaaacgaatggtctgcacaagttcgttaagggcgatctgctacaggaagctatcgattttgcccaaaaagaaattaacggcgatgatgacgaggacgaagatgacagtgataacgtcatgtccagtgatgatgaaaatgctccagtggctacgaatgcaaacgctaccactgaccaagagggtgatattcacctagaatag

SEQ ID NO: 10818 - DNA, 867 bp, Artificial Sequence
  Description of Artificial Sequence: Synthetic polynucleotide
atgacatccattggtactggttacgatctttccaatagtgttttttcccccgatggtagaaatttccaagtagagtatgccgtcaaagcagtcgaaaacggtaccacatctatcggtataaagtgtaacgacggtgtagtctttgcagtggaaaagctcattacgtctaaattattggtcccacaaaaaaatgtcaagattcaagtcgtagaccgtcacatcggttgcgtttattctggtttgattcctgatggtaggcacttggttaatcgtggtcgtgaagaagccgccagcttcaaaaagctttataaaacgcccattcccattcctgcatttgcagaccgtttaggacaatatgtgcaggcgcacactttatacaacagtgttagaccgttcggggtcagtaccatctttggtggtgtagataaaaatggtgctcatctttacatgttggaaccaagtggctcttattggggctacaagggggctgccactgggaaaggtaggcaatctgcgaaggctgaattggaaaaattagttgaccatcatccagaaggtctttctgcaagagaggccgttaaacaagctgcaaagattatctatttggcacacgaggataacaaggaaaaggattttgaattggaaataagttggtgttctttatctgaaacgaatggtttacacaagttcgttaagggcgatttattgcaggaagctatcgattttgcccaaaaagaaattaacggcgatgatgacgaggacgaagatgacagtgataacgtcatgtccagtgatgatgaaaatgctccagtggctacgaatgcaaacgctaccactgaccaagagggtgatattcacttggaatga

SEQ ID NO: 10819 - DNA, 2991 bp, Saccharomyces cerevisiae
atgtactttacagacgaatcatcaccggcaatgaatagagtaggtaaaaaaaggaatagactttcttttgtttgccaagcttgtagaaaagcaaagacgaagtgtgaccaggaaaaacctagatgtggcagatgtactaaacaaaacctcttttgtatatatgatgtcgccagacaggcggcccctaggaatccgaataaggatgccaccatagcgagactgaaaaaggagattcgttactggagaaataaaaccgtggatttgactcaagaaaagaaagacttctacactgcattgaaaaggccgactgaagaattagctgctagaaggacatgtaaaagcttgcaggaaaatagctttccaataagtctttataagactcatcccagattgattatgaccaaagtgatgaaaagagaaatcaaccctttatctgagaagtacttaatatttcaagatacctttctgaagacattaattgcctccgtgcttctaagttgttccagaaactccatgattcctgctttaaatgcagatattagtaggtcgaggacacagccatgcgtaaagaataacgttgtaaaaatgagagaggttctattgaaaaactcaaaatacgaatcacaaagaaaatccattaacgagtttacggacaggctactacagagaaagaaccctgaagaacagattgcggtaaataaagtaatttctttattatacagtaacagggaatcgtcatatttagaggatacatgccccaccgaaaacgactattctgatttgttgaaaggctacatcaatgaaatcgagaaaacgctccctcccaaggcaatcattgaacagtacctctctcatttctttgagcatattttccacctaatccctttcgccagcaaggaaatgttggaggaatcaattcacacaacagtacagtataatgaattaggagaggtacgactatcgatgggcacaacccttatacgaaataaaatggagaatctgtgtatcttactgttaattttgaggatcgcgtatatctctttgacatttatagaagataagattgaagattacagtccgtatattaccaaagagatgctagagcaatatccgattcaaagcgaagtaattttcctagcgcagcagatacttgcatcggaaaattggtgtgcttgtgcaaatgaaaataccatttcatgcttactctatatctggtgtgcatttgttttttccccaactgagggtgattttctgttagaacaaccgtcggatgttataattaaccttgtcatactaatagggacgtctatcggattacatcgtgacccatctgactttccagccttgaaccaccccgaagcttcagacaaaaggctgctaaatttacgaaggatacagtggctatcaattatctctatggcaactctggagtcaagcctgaagggtagactattggtctcacccctttcaatgattgatcttttcattgacgttcgggatcccaattgtgtagaaatctataaaaaaagggttaagaaggatctaacaggttccgaatcggatgagcaactgctcgaaatccatgagatttttttccatagggctcaattagcattattcttgtctgatttgaataatataaccatttcatacagtggttcggttccaatggatacactagaaactttacgcgttaaagccaatgaacttttaaaaaacaaatttcagctaagaagtgtggatattaacatctacgacgaagagaagacatttcaaaaactaacgttcaattcaattttgaattctataagtttatcgggccagatcttgggtaaattaatgatgttaagggcctcaatagcgctgatgttatattttgaaacacttgcaatggagagaagcgaatgcttatccttcttctataagtatttttttcaatgttgtgccgacaccatttccctaatcagattttttttcctgtatttcaatggcagttacgagaaagttctttcttctttagtttgtttcatcactacaaaagttattcaattggctgttcctaccacgatgtttacccttttggtcatcatcatgcgggtagagctggccaaaaatatgcttctggtcaaatgtaacgaatgcaatgccagaggtgacattagtgacctcccagaaataaaggagaaaataaagtcattggacactatcaaggagaacttcgagaggcttttgttggaagtatatttacttgcgtcccaaaacctgagatttaaatatttctacattttcaagatgttgaccttgtttgacgtattcattcaaaggctgaggaaaggtcaattattttctggtttgtttgtcaaagtagacaaagacttgactaccaaaaaaattgccacaatgttggagttgacacttggaattaacttggacaagtctgaccatttaattgatagactaaagggcaaaaatctcactgttaactttacccttgatcaattataccaaatcatcaaagaatttgacagaataaaaaacatcggtgttgctgacccacaaaattctctgaatccatcaaaaccaaacatgaaagataatacacccacaattgaacttttactcaactccagcgtggaaaatgagagtgtaccaccgtacagcagctcaaatgaccctacaaatgttggtaatgcctccacttatagcttagcacacaatattagtaaccaaaataatgaggaaaacatgcctccgtcaattggttcgagtgaaagtaaccgtgccgctcctaatctaaactttatgccgataaacaataactacaataacagtggttcgaacattaataacaatgacaatgttaagttaccgagtaattttaaaaactactatgaccctcccatgtcttctttggacatatccatggatgttcccgatatttttggtagccttgatttcttcgattatgacctacttttccagaacgactag

SEQ ID NO: 10820 - DNA, 2991 bp, Artificial Sequence
  Description of Artificial Sequence: Synthetic polynucleotide
atgtactttacagacgaatcttctccggcaatgaatagagtaggtaaaaaaaggaatagactttcttttgtttgccaagcttgtagaaaagcaaagacgaagtgtgaccaggaaaaacctagatgtggcagatgtactaaacaaaacctcttttgtatatatgatgtcgccagacaggcggcccctaggaatccgaataaggatgccaccatagcgagattgaaaaaggagattcgttactggagaaataaaaccgtggatttgactcaagaaaagaaagacttctacactgcattgaaaaggccgactgaagaattagctgctagaaggacatgtaaaagcttgcaggaaaatagctttccaataagtctttataagactcatcccagattgattatgaccaaagtgatgaaaagagaaatcaaccctttatctgagaagtacttaatatttcaagatacctttttgaagacattaattgcctccgtgcttttaagttgttccagaaactccatgattcctgctttaaatgcagatattagtaggagtaggacacagccatgcgtaaagaataacgttgtaaaaatgagagaggttttattgaaaaactccaaatacgaatctcaaagaaaatccattaacgagtttacggacaggcttttacagagaaagaaccctgaagaacagattgcggtaaataaagtaatttctttattatacagtaacagggaatcttcttatttagaggatacatgccccaccgaaaacgactattctgatttgttgaaaggctacatcaatgaaatcgagaaaacgctccctcccaaggcaatcattgaacagtacctctctcatttctttgagcatattttccacttaatccctttcgccagcaaggaaatgttggaggaaagtattcacacaacagtacagtataatgaattaggagaggtaagattatctatgggcacaacccttataagaaataaaatggagaatttatgtatcttattattaattttgaggatcgcgtatatctctttgacatttatagaagataagattgaagattacagtccgtatattaccaaagagatgttagagcaatatccgattcaaagcgaagtaattttcttggcgcagcagatacttgcatctgaaaattggtgtgcttgtgcaaatgaaaataccatttcttgcttactctatatctggtgtgcatttgttttttccccaactgagggtgattttttattagaacaaccgagtgatgttataattaaccttgtcatattaatagggacgtctatcggattacatcgtgacccatctgactttccagccttgaaccaccccgaagcttctgacaaaaggcttttgaatttaagaaggatacagtggttatccattatctctatggcaactttagagagcagcttgaagggtagattattggtctctcccctttctatgattgatcttttcattgacgttagagatcccaattgtgtagaaatctataaaaaaagggttaagaaggatttaacaggttccgaaagtgatgagcaattgctcgaaatccatgagatttttttccatagggctcaattagcattattcttgtctgatttgaataatataaccatttcttacagtggttctgttccaatggatacattagaaactttacgcgttaaagccaatgaacttttaaaaaacaaatttcagttaagaagtgtggatattaacatctacgacgaagagaagacatttcaaaaattaacgttcaattctattttgaattctataagtttaagtggccagatcttgggtaaattaatgatgttaagggcctctatagcgttaatgttatattttgaaacacttgcaatggagagaagcgaatgcttatccttcttctataagtatttttttcaatgttgtgccgacaccatttccttaatcagattttttttcctctatttcaatggcagttacgagaaagttctttcttctttagtttgtttcatcactacaaaagttattcaattggctgttcctaccacgatgtttacccttttggtcatcatcatgagagtagagttggccaaaaatatgcttttggtcaaatgtaacgaatgcaatgccagaggtgacattagtgacctcccagaaataaaggagaaaataaagtctttggacactatcaaggagaacttcgagaggcttttgttggaagtatatttacttgcgtcccaaaacttgagatttaaatatttctacattttcaagatgttgaccttgtttgacgtattcattcaaaggttgaggaaaggtcaattattttctggtttgtttgtcaaagtagacaaagacttgactaccaaaaaaattgccacaatgttggagttgacacttggaattaacttggacaagtctgaccatttaattgatagattaaagggcaaaaatctcactgttaactttacccttgatcaattataccaaatcatcaaagaatttgacagaataaaaaacatcggtgttgctgacccacaaaattctttgaatccatctaaaccaaacatgaaagataatacacccacaattgaacttttactcaactccagcgtggaaaatgagagtgtaccaccgtacagcagcagtaatgaccctacaaatgttggtaatgcctccacttatagcttagcacacaatattagtaaccaaaataatgaggaaaacatgcctccgtctattggtagtagtgaaagtaaccgtgccgctcctaatttgaactttatgccgataaacaataactacaataacagtggttccaacattaataacaatgacaatgttaagttaccgagtaattttaaaaactactatgaccctcccatgtcttctttggacatatccatggatgttcccgatatttttggtagccttgatttcttcgattatgacttacttttccagaacgactga

SEQ ID NO: 10821 - DNA, 2112 bp, Saccharomyces cerevisiae
atgcttcccattaaagtcttctctttatctcggatttttgttttgctagcaatcttccgacaaatacacgctatttccattaacagctctactttccaggtttctaactcttttacactactgaacaacgcatcgactctattcccagtaccatttgatgcatatactaaagaatatctaaggacttcggctctgttgacttgtgctaaagactcacagttttctgcatcgtatttcgaagctgcttttttcccgagaaataatactctattctttaatgttgaagcacaaacaattatgagcgaaaacataaccatcaaggcagaattgattgcatatggtctcaatgtttataccaaagtttttgatctatgtggaatccaagataatttattatgtccgttgaagccgggaaatatagaactcatgggaagttattatgttgaggccgcggtagctagccaaataccaagcataacatataatatacctgacttagacgcatatattgtggtgacagcatactccactattgataaagaatttaccaaacctctagcatgtgtacaagtgatgttatcaaatggtagaacagtccaaacagagtatttatcgtggaatctagtgatattgacaatttccggaattatgttttcagtggtttattctttgcaaggttatacggttacttcaacaagactggcgtcttattcaatatcgctacttttatatttccaaaatttggctattttagctatgattagtgtatcatttttaccgcctattgtcgccgcttggactcaaaatttccaatggtcaatgggaataataaggataaattttatgcagcggttatttgactggtatgttgtcgcaacatctgggtcccccaccgttgtataccgcaataaagaagttttatcgatcagtgttcaaaaaagatccttgaacagtaaaatcatatcagcgtcaagtaatttaaatggtattgaaagttcccaaaaaaatgatttattatacacttcaaatttgagaaattcaaatgactatctgtcaaaaattttagtattaagaggtattaaaagggtgtcttacaaagctggaattgagatatcaaatttctttttaacgggattttccttctttatcatattcatttgtatgataatattggcgtttattatcttcaaaacatttttgaaagtacttcagaagtttaaagttaagacaattagatatttacacttccacacacattggagtgcacttttacaggggacactatatcgagcggtgttcataatttattctgagatatctcttttagcactttgggagttcactcaaacagactcagcagctaccttagtggaggcaatcgttgttttcattttgattacagtcttgttatcatccgcaagcgtaagaatatggaggaagatgatcaagtctaagaaaatatttggccagccaagctatttactcttcagtagctcgaaattcttaaacaagttcggctttctttcctctcaatttaagtctacaaaagtctggtggttaatggcgacctctgcacacatgcttattaggtctatactagtgggttctctacaagcgcacggaaaatctcaatctattggtatctttttgaatgaagctatctatctcatccttttgtgctggatgcaaccttacatggataaaacaaccaacttcttcaatattagtatccattcactgaatttagtgaacgcattttttttcttatttttcagtaacttatttcagcagcccatagctgtgtcttcttttatgggactaattttcttttttctaaatgcagcgttttctttgtatctcttcattttcatattgatatgctttacgatggcaatatactacaaacaccctgatacaagatacaaacctattgatgatcaaagacgatcctttttgaagggtgaaatggatgatgatgcggtttacgaatcggtcccggaactgcacgaaatgaagaaagccgttcttgaatgcaacggtattcaaaagccgcagatcaataagattgacctttgtaaacaaaattcgaactgtgaatatctgtatatgtga

SEQ ID NO: 10822 - DNA, 2112 bp, Artificial Sequence
  Description of Artificial Sequence: Synthetic polynucleotide
atgcttcccattaaagtcttctctttatctagaatttttgttttgttggcaatcttcagacaaatacacgctatttccattaacagctctactttccaggtttctaactcttttacattattaaacaacgcatctactttattcccagtaccatttgatgcatatactaaagaatatttgaggactagtgctttattgacttgtgctaaagactctcagttttctgcaagttatttcgaagctgcttttttcccgagaaataatactttattctttaatgttgaagcacaaacaattatgagcgaaaacataaccatcaaggcagaattgattgcatatggtctcaatgtttataccaaagtttttgatttatgtggaatccaagataatttattatgtccgttgaagccgggaaatatagaactcatgggaagttattatgttgaggccgcggtagctagccaaataccaagcataacatataatatacctgacttagacgcatatattgtggtgacagcatactccactattgataaagaatttaccaaacctttggcatgtgtacaagtgatgttatccaatggtagaacagtccaaacagagtatttatcttggaatttggtgatattgacaatttccggaattatgttttctgtggtttattctttgcaaggttatacggttacttctacaagattagcgtcttattctatatctttacttttatatttccaaaatttggctattttagctatgattagtgtatcctttttaccgcctattgtcgccgcttggactcaaaatttccaatggtctatgggaataataaggataaattttatgcagagattatttgactggtatgttgtcgcaacatctgggtcccccaccgttgtataccgcaataaagaagttttatctatcagtgttcaaaaaagatccttgaacagtaaaatcatatctgcgtccagtaatttaaatggtattgaaagttcccaaaaaaatgatttattatacacttccaatttgagaaatagtaatgactatttatccaaaattttagtattaagaggtattaaaagggtgtcttacaaagctggaattgagatatccaatttctttttaacgggattttccttctttatcatattcatttgtatgataatattggcgtttattatcttcaaaacatttttgaaagtacttcagaagtttaaagttaagacaattagatatttacacttccacacacattggagtgcacttttacaggggacattatatagagcggtgttcataatttattctgagatatctcttttagcactttgggagttcactcaaacagactctgcagctaccttagtggaggcaatcgttgttttcattttgattacagtcttgttatcttccgcaagcgtaagaatatggaggaagatgatcaagtctaagaaaatatttggccagccaagctatttactcttcagtagcagtaaattcttaaacaagttcggctttctttcctctcaatttaagtctacaaaagtctggtggttaatggcgacctctgcacacatgcttattaggtctatattggtgggttctttacaagcgcacggaaaatctcaatctattggtatctttttgaatgaagctatctatctcatccttttgtgctggatgcaaccttacatggataaaacaaccaacttcttcaatattagtatccattctttgaatttagtgaacgcattttttttcttatttttcagtaacttatttcagcagcccatagctgtgtcttcttttatgggattgattttcttttttttgaatgcagcgttttctttgtatctcttcattttcatattgatatgctttacgatggcaatatactacaaacaccctgatacaagatacaaacctattgatgatcaaagaagatcctttttgaagggtgaaatggatgatgatgcggtttacgaatctgtcccggaattgcacgaaatgaagaaagccgttcttgaatgcaacggtattcaaaagccgcagatcaataagattgacctttgtaaacaaaatagcaactgtgaatatttgtatatgtga

SEQ ID NO: 10823 - DNA, 603 bp, Saccharomyces cerevisiae
atgagttacgataagaaggcagatgtcacatccttagatgaagatttgagacaactaagagaaagcaaattttcaccggaagcaattcaaaatatcaaaatatgggtatataaatctgtcctaaaagagatagctcctcctggagacttattggaatgcttgaaagatggaacagtcctatgtaagctggcaaatattttatatgaagcagacacaggagaagctaaccatattagttggaagagctctaaaatgccatttgttcaaatggatcaaatttcccaatttttatcattttcgagaaaatatggtgtgcctgaagatgaactgtttcagacaattgatctttttgagaaaaaggatcctgccattgttttccaaacgttgaagtcactatctcgttacgccaacaaaaaacatacagatagatttccagttctaggaccacaactgtcaacaaagaagccaagacccccggttaagtctaaaccaaaacatctacaagatggtactggatggagcacttttgaatacggttatatgaaaggtgcatctcaggctactgaaggagtggtgttaggacaacggagagatatagtttag

SEQ ID NO: 10824 - DNA, 603 bp, Artificial Sequence
  Description of Artificial Sequence: Synthetic polynucleotide
atgagttacgataagaaggcagatgtcacatccttagatgaagatttgagacaattgagagaaagcaaattttctccggaagcaattcaaaatatcaaaatatgggtatataaatctgtcttgaaagagatagctcctcctggagacttattggaatgcttgaaagatggaacagtcttatgtaagttagcaaatattttatatgaagcagacacaggagaagctaaccatattagttggaagagctctaaaatgccatttgttcaaatggatcaaatttcccaatttttatctttttccagaaaatatggtgtgcctgaagatgaattatttcagacaattgatctttttgagaaaaaggatcctgccattgttttccaaacgttgaagtctttatctcgttacgccaacaaaaaacatacagatagatttccagttttaggaccacaattatctacaaagaagccaagacccccggttaagtctaaaccaaaacatttacaagatggtactggatggagcacttttgaatacggttatatgaaaggtgcatctcaggctactgaaggagtggtgttaggacaaagaagagatatagtttga

SEQ ID NO: 10825 - DNA, 1206 bp, Saccharomyces cerevisiae
atgcgaatcaacagtgagctagcgaacaagttttctgcctcaacggtgcacttagaacatatcacaactgctttaagttgtttaacaccttttggttctaaagacgatgtgcttatattcattgatgctgatgggctgtcatttgtcagggagaataatcatgtgataaaaatccaactactgttatctcgggagctatttatgtcttattcgtatagaaatgaaactgaggatcacatgaaactttgtgtaaaaataaatcatatcttagatagcgttagcgtgatgaacaggaattcggatgacattgttgagtgtactttatcttatgatggacatggatcaccatttgtactaatatttgaagactcgttcatttctgagagagtggagtactctacctacttaattaaggattttgatactaatggactagaactcgatagagaaaggataagctttgaggcaattattaagggcgaagcccttcattcagccttaaaggatctaaaagaaatcggatgcaaagagtgctatgtatatgcaaagaccgaggcgaatgatgagaatgtatttgccctgatatctaaatctcagctaggattttctaaaataaaattacccagtaacagatccatactagagaagttacaagtatttgacggagattccacaacagtaatagatggttttgctgtaattgggttcttcgatttcacctcgtttgataaaatcagaaagagtactaaaattgcaagcaaagtccttttcaggatggatgttcatggcgtattgagtgtaaatattctaagtcaaacagacgatgtcattatcactgatactacaagaccttcaaataatcgaccaggtagtattcgccaactgcagctacccaaggattatcccggtatagtaattgaggtttgcatgctagaaaaagaatccatagatgaggcagcacagacagaaatagaactcctgatggagactaatgaacttggcaatcgtaatagttttaaaaaatcaactataagaaaaagatatggtacagataaaggcaatgaaacttcaaatgacaacttgctgcaattgaatgggaaaaaaattaaactaccatctgaagaagaaaacaataaaaacagggaaagtgaggatgaagagaatcactgcaagtatccaacaaaggatattcctatatttttttaa

SEQ ID NO: 10826 - DNA, 1206 bp, Artificial Sequence
  Description of Artificial Sequence: Synthetic polynucleotide
atgagaatcaacagtgagttagcgaacaagttttctgcctctacggtgcacttagaacatatcacaactgctttaagttgtttaacaccttttggttctaaagacgatgtgcttatattcattgatgctgatgggctttcttttgtcagggagaataatcatgtgataaaaatccaattattattatctagagagttatttatgtcttattcttatagaaatgaaactgaggatcacatgaaactttgtgtaaaaataaatcatatcttagatagcgttagcgtgatgaacaggaattctgatgacattgttgagtgtactttatcttatgatggacatggatctccatttgtattaatatttgaagactctttcatttctgagagagtggagtactctacctacttaattaaggattttgatactaatggattagaactcgatagagaaaggataagctttgaggcaattattaagggcgaagcccttcattctgccttaaaggatttgaaagaaatcggatgcaaagagtgctatgtatatgcaaagaccgaggcgaatgatgagaatgtatttgccttaatatctaaatctcagttaggattttctaaaataaaattacccagtaacagatccatattggagaagttacaagtatttgacggagattccacaacagtaatagatggttttgctgtaattgggttcttcgatttcacctcttttgataaaatcagaaagagtactaaaattgcaagcaaagtccttttcaggatggatgttcatggcgtattgagtgtaaatattttaagtcaaacagacgatgtcattatcactgatactacaagaccttccaataatagaccaggtagtattcgccaattgcagttgcccaaggattatcccggtatagtaattgaggtttgcatgttggaaaaagaatccatagatgaggcagcacagacagaaatagaactcttaatggagactaatgaacttggcaatcgtaatagttttaaaaaatctactataagaaaaagatatggtacagataaaggcaatgaaacttccaatgacaacttgttgcaattgaatgggaaaaaaattaaattaccatctgaagaagaaaacaataaaaacagggaaagtgaggatgaagagaatcactgcaagtatccaacaaaggatattcctatatttttttga

SEQ ID NO: 10827 - DNA, 432 bp, Saccharomyces cerevisiae
atgtctgacgttgaagaagtcgttgaagttcaagaagaaactgttgttgaacaaactgccgaagttactatcgaagatgctttgaaggttgttttgagaaccgctttggttcacgatggtctagctagaggtttgagagaatctaccaaggctttaaccagaggtgaagctttattggttgttttggtcagctctgttactgaagctaacattatcaagttggttgaaggtttggctaacgacccagaaaacaaggttccattgatcaaggttgctgatgctaagcaattaggtgaatgggctggtttgggtaagatcgaccgtgaaggtaacgccagaaaggttgtcggtgcctccgttgttgttgtcaagaactggggtgctgaaactgatgaattgtccatgatcatggaacacttctcccaacaataa

SEQ ID NO: 10828 - DNA, 432 bp, Artificial Sequence
  Description of Artificial Sequence: Synthetic polynucleotide
atgtctgacgttgaagaagtcgttgaagttcaagaagaaactgttgttgaacaaactgccgaagttactatcgaagatgctttgaaggttgttttgagaaccgctttggttcacgatggtttagctagaggtttgagagaatctaccaaggctttaaccagaggtgaagctttattggttgttttggtcagctctgttactgaagctaacattatcaagttggttgaaggtttggctaacgacccagaaaacaaggttccattgatcaaggttgctgatgctaagcaattaggtgaatgggctggtttgggtaagatcgaccgtgaaggtaacgccagaaaggttgtcggtgcctccgttgttgttgtcaagaactggggtgctgaaactgatgaattgtccatgatcatggaacacttctcccaacaatga

SEQ ID NO: 10829 - DNA, 1812 bp, Saccharomyces cerevisiae
atgttaagtcctgaacgtagaccatccatggcagaacgccgcccatcatttttcagttttactcaaaatccaagtcctctagttgtcccgcatttagccggtattgaagaccctttgccagccactacaccagataaagttgatgttttaatcgcagggactggtatggtagagagtgtattggctgctgcattagcttggcaaggttccaatgtccttcatattgataagaatgattattacggtgacacttcagccacactaactgtagaccaaatcaaaagatgggtaaatgaagttaatgaaggctcagtaagttgctataaaaatgcgaagttgtatgtatccacgctaatcggtagtggtaaatattcttcaagagatttcggtattgatctttccccgaagatcctatttgcaaaatctgatttattatccatcttaatcaaatcaagagttcaccagtatttagaattccaatctttatctaatttccatacttatgaaaatgattgtttcgaaaaactaacaaatacaaagcaagaaatattcacggatcaaaacctaccactaatgacaaagaggaacttaatgaaatttatcaaattcgtactcaactgggaagcacaaacggaaatatggcaaccctacgcggagaggaccatgtctgattttttaggggaaaagtttaaattagaaaaaccacaagtcttcgaattaatcttctcaattgggttatgttatgatctcaacgtaaaagtaccagaagctttacaaaggattcgtcgatatctaactagtttcgatgtttatggaccattccctgcactatgctccaagtatggtgggccaggagaattgtcgcaagggttttgtagatctgccgctgtaggtggcgctacttacaaactcaatgagaaattggtatccttcaaccctacaactaaagtggccacattccaagatggatccaaagttgaagtttcagagaaagtgataatatcgcctacgcaagcacctaaagacagtaagcatgtccctcaacaacagtaccaggttcatcgtttgacctgtatagttgaaaacccctgtactgaatggttcaatgagggtgaatcggccgccatggtagtcttccctcctggctctttgaaatctggtaataaggaagtagtacaagcctttattctcggtgctggcagcgaaatttgtccagaaggaactattgtatggtatttatcgaccacagaacaaggcccacgtgctgaaatggacattgatgccgctctagaagctatggaaatggccctgctaagggaatcgtcttcaggtttagagaacgacgaagaaattgttcaactaacgggaaatggtcatacaatagtaaattcagttaagttaggccaatcttttaaggagtatgttcctagggaaagattacagttcttatttaaactttattatacccaatacacatccacgccaccctttggtgtagttaactcctccttctttgatgtaaatcaagatttggaaaaaaagtatattcccggtgcgagtgataatggcgtcatatatacaaccatgccttctgctgagatatcgtatgatgaagtagtcaccgcagccaaagttttatacgaaaagatagttggcagtgatgatgacttcttcgatttagattttgaagatgaggatgaaatacaggctagcggcgttgctaatgcggaacaatttgaaaatgccatagacgatgacgacgatgtcaatatggaaggttccggtgaatttgtaggtgaaatggagatatga

SEQ ID NO: 10830 - DNA, 1812 bp, Artificial Sequence
  Description of Artificial Sequence: Synthetic polynucleotide
atgttaagtcctgaacgtagaccatccatggcagaacgccgcccatcttttttcagttttactcaaaatccaagtcctttggttgtcccgcatttagccggtattgaagaccctttgccagccactacaccagataaagttgatgttttaatcgcagggactggtatggtagagagtgtattggctgctgcattagcttggcaaggttccaatgtccttcatattgataagaatgattattacggtgacacttctgccacattgactgtagaccaaatcaaaagatgggtaaatgaagttaatgaaggctctgtaagttgctataaaaatgcgaagttgtatgtatccacgttgatcggtagtggtaaatattcttctagagatttcggtattgatctttccccgaagatcttatttgcaaaatctgatttattatccatcttaatcaaatctagagttcaccagtatttagaattccaatctttatctaatttccatacttatgaaaatgattgtttcgaaaaattaacaaatacaaagcaagaaatattcacggatcaaaacttaccattaatgacaaagaggaacttaatgaaatttatcaaattcgtactcaactgggaagcacaaacggaaatatggcaaccctacgcggagaggaccatgtctgattttttaggggaaaagtttaaattagaaaaaccacaagtcttcgaattaatcttctccattgggttatgttatgatctcaacgtaaaagtaccagaagctttacaaaggattcgtcgttatttgactagtttcgatgtttatggaccattccctgcattatgctccaagtatggtgggccaggagaattgtctcaagggttttgtagatctgccgctgtaggtggcgctacttacaaactcaatgagaaattggtatccttcaaccctacaactaaagtggccacattccaagatggatccaaagttgaagtttctgagaaagtgataatatctcctacgcaagcacctaaagacagtaagcatgtccctcaacaacagtaccaggttcatcgtttgacctgtatagttgaaaacccctgtactgaatggttcaatgagggtgaaagtgccgccatggtagtcttccctcctggctctttgaaatctggtaataaggaagtagtacaagcctttattctcggtgctggcagcgaaatttgtccagaaggaactattgtatggtatttatctaccacagaacaaggcccacgtgctgaaatggacattgatgccgctttggaagctatggaaatggccttgttgagggaaagctcttctggtttagagaacgacgaagaaattgttcaattaacgggaaatggtcatacaatagtaaattctgttaagttaggccaatcttttaaggagtatgttcctagggaaagattacagttcttatttaaactttattatacccaatacacatccacgccaccctttggtgtagttaactcctccttctttgatgtaaatcaagatttggaaaaaaagtatattcccggtgcgagtgataatggcgtcatatatacaaccatgccttctgctgagatatcttatgatgaagtagtcaccgcagccaaagttttatacgaaaagatagttggcagtgatgatgacttcttcgatttagattttgaagatgaggatgaaatacaggctagcggcgttgctaatgcggaacaatttgaaaatgccatagacgatgacgacgatgtcaatatggaaggttccggtgaatttgtaggtgaaatggagatatga

SEQ ID NO: 10831 - DNA, 2694 bp, Saccharomyces cerevisiae
atgcctcaagcaagcacattcggatcgcacagtctagaagctcatcccttacacattcagccagctgttcatatcaaactcagtaaagaggaaaggtctcactacagggagcaatacgattcattaaagtatatttcaaattatgtttctgttttcgaccaagcgttaagcgacaatattgactctaggattagaaaagaaaatgaagccttactgaaaaaatattatgaatcaagaaaaccttttacttttaccagctttaggcaaggaagtgtaatcagttcttctgattcttctacaggcttcactgagagaacaaagacctactgttttttgaacgatttcgtcagtaattgcgtaaatgaggtagatccatatacgctgaaaatgacagtaagaaatagaaacactgccttgaatatggagaacctcgatgatgaacgtaagagcaaagatgatatatacgattttgaagataatactgacgacgagtgtaatgccaagtgccatggtgctttccattattcgtcagaaagattggaaattcttcgctcacgttcgacaatatcgtactttaagtattataaaaagcttttgacggtagacctaagggacagtgatgttttaaaaaggcataatttatggatgccaatgatcactagaagatttagatttttattagtatcaagttcgaaaccggaagatgtaaggttaacaacgccgattccaacattctcggaatcagatttagacattttcaagaacaagacatgtccactctttatcaatggtacagactgtgttcctagaagttatgacactttttcgggttcttctgtaatcgcttcaatattttcagaatataaacttccatccctttcatatcattgttctgtcgagttgaacgaccaattatttattgtcggtggtttgatggcatgtcatagatatgatgaggaagcgcctgatctaaaggatttttacgtggatggcataaagaatttaccgccaccactaataccagagctaattaataacccatccatgattcctaatcctcacttgtactgtttttccttgacttcttccagactaacaagacctgatatttctggttacattccgcccccactggtgtgcacccagggctgtaaattaactgaaaggcatatctttttgtatggcgggtttgaaatcaagtcggaaacccaagttgatgataagggaagatattttataagaaaaagagcttttttgaacaatactggttacattctagatacagtgacgttcaatttctcaaagattgaattagtcgctcctccgtaccagtttgcaatttacaataatttctcgccaagatttggtcacatgcaggcatcaataagtaattccaacaacaatgtatccaatgaaaataccacaacaagtgcgaaaggaagaaggtcgataagcccatatcgccaaggtaatggggatcacaaaatagatgatttggttggttcaccaggaagtacggactatttagaggatgatgcaattccacctgtaacaaacccaaggtctacagatagtctctcttccaaacattgtagcacagcaacacacatttgctcatctgttaataccattctgatctttggagggtatagtcagactggtgacgacaagtatgaagctatgaatgacatgtggaagataaatatccctgtagtttctcgtgggaaacgtaattattataaatttgcagatactgtaactgctactaagatccctattattgatgatccagaattatggccgagcagaagagccttttcagcgtgctgtgtaccagattattttaccaaggatgttgaacccatagaaacgagattactgaggaacttgaaaaatgacttctccatcgatttggaaatacgcccaggaaataagccttctcaaccactttttccgaatatcccacattcaaggaaggagaagaagagtggtcgcgatagtatgcatatttccaattctaataatagtactagtgaagacacttcttcaaagtctaccaggaataccacatccagtcctcccacaagccctaaacatacaccaccattgaatccatcaaaaaaatgtgcatcaatcggaagaactattgcgttccacggaggttcagatggctatgacgtttgcagcgatatgtggtggtttgacttcgattccgaaacctggactaaaatagacctttatgccaaaacacaagaggaatctgatggtttggtacctatcaacttatgtatggtaggacactcaatgacaactgtaggccacaaggttgtgcttatcgggggtctacgacaaggtgatgttgaccgaatataccgggacgaaactcttcctgaagaagtaatatcgggtgttccactcggaagtggcgttataaatgtcgtggatttaaatacacaatgccttcaaggttgcaagctaatacgaaatgatggagatactaaagaatctgtcattatggatcctcatgtcggcacaccccaccaagtattggccgtcgcaggtactatagaactggtcaaaggaaccatgaccttaataggaggtgtagtagccggtcgcgaagacatttcgagcctttacttgagaggagctgtcttacaattcattctaccaagcatgaatctagccaactaa

SEQ ID NO: 10832 - DNA, 2694 bp, Artificial Sequence
  Description of Artificial Sequence: Synthetic polynucleotide
atgcctcaagcaagcacattcggatctcacagtttagaagctcatcccttacacattcagccagctgttcatatcaaactcagtaaagaggaaaggtctcactacagggagcaatacgattctttaaagtatatttctaattatgtttctgttttcgaccaagcgttaagcgacaatattgactctaggattagaaaagaaaatgaagccttattgaaaaaatattatgaatctagaaaaccttttacttttaccagctttaggcaaggaagtgtaatcagttcttctgattcttctacaggcttcactgagagaacaaagacctactgttttttgaacgatttcgtcagtaattgcgtaaatgaggtagatccatatacgttgaaaatgacagtaagaaatagaaacactgccttgaatatggagaacctcgatgatgaacgtaagagcaaagatgatatatacgattttgaagataatactgacgacgagtgtaatgccaagtgccatggtgctttccattattcttctgaaagattggaaattcttcgcagtcgttccacaatatcttactttaagtattataaaaagcttttgacggtagacttgagggacagtgatgttttaaaaaggcataatttatggatgccaatgatcactagaagatttagatttttattagtatctagttctaaaccggaagatgtaaggttaacaacgccgattccaacattctctgaaagtgatttagacattttcaagaacaagacatgtccactctttatcaatggtacagactgtgttcctagaagttatgacactttttctggttcttctgtaatcgcttctatattttctgaatataaacttccatccctttcctatcattgttctgtcgagttgaacgaccaattatttattgtcggtggtttgatggcatgtcatagatatgatgaggaagcgcctgatttgaaggatttttacgtggatggcataaagaatttaccgccaccattgataccagagttgattaataacccatccatgattcctaatcctcacttgtactgtttttccttgacttcttccagattgacaagacctgatatttctggttacattccgcccccattggtgtgcacccagggctgtaaattaactgaaaggcatatctttttgtatggcgggtttgaaatcaagtctgaaacccaagttgatgataagggaagatattttataagaaaaagagcttttttgaacaatactggttacattttagatacagtgacgttcaatttctccaagattgaattagtcgctcctccgtaccagtttgcaatttacaataatttctctccaagatttggtcacatgcaggcatctataagtaattccaacaacaatgtatccaatgaaaataccacaacaagtgcgaaaggaagaaggtctataagcccatatcgccaaggtaatggggatcacaaaatagatgatttggttggttctccaggaagtacggactatttagaggatgatgcaattccacctgtaacaaacccaaggtctacagatagtctctcttccaaacattgtagcacagcaacacacatttgctcttctgttaataccattttgatctttggagggtatagtcagactggtgacgacaagtatgaagctatgaatgacatgtggaagataaatatccctgtagtttctcgtgggaaacgtaattattataaatttgcagatactgtaactgctactaagatccctattattgatgatccagaattatggccgagcagaagagccttttctgcgtgctgtgtaccagattattttaccaaggatgttgaacccatagaaacgagattattgaggaacttgaaaaatgacttctccatcgatttggaaatacgcccaggaaataagccttctcaaccactttttccgaatatcccacattccaggaaggagaagaagagtggtcgcgatagtatgcatatttccaattctaataatagtactagtgaagacacttcttccaagtctaccaggaataccacatccagtcctcccacaagccctaaacatacaccaccattgaatccatctaaaaaatgtgcatctatcggaagaactattgcgttccacggaggttctgatggctatgacgtttgcagcgatatgtggtggtttgacttcgattccgaaacctggactaaaatagacctttatgccaaaacacaagaggaatctgatggtttggtacctatcaacttatgtatggtaggacactccatgacaactgtaggccacaaggttgtgcttatcgggggtttaagacaaggtgatgttgacaggatatacagagacgaaactcttcctgaagaagtaatatctggtgttccactcggaagtggcgttataaatgtcgtggatttaaatacacaatgccttcaaggttgcaagttaataagaaatgatggagatactaaagaatctgtcattatggatcctcatgtcggcacaccccaccaagtattggccgtcgcaggtactatagaattggtcaaaggaaccatgaccttaataggaggtgtagtagccggtcgcgaagacatttctagcctttacttgagaggagctgtcttacaattcattttaccaagcatgaatttggccaactga

SEQ ID NO: 10833 - DNA, 1665 bp, Saccharomyces cerevisiae
atggacagagatataagctaccagcaaaattatacctcaactggggcaactgcaacttcctcaagacagccctctacggacaataatgcagatacaaattttttgaaggtaatgtcagaattcaaatataattttaacagtccgttacctacaacgactcaattccccacgccctattcttctaatcagtatcaacagactcaagatcattttgccaatacagacgctcacaacagttcgagcaacgaatcgtcgttggtagagaacagtatattaccgcatcatcagcagatacaacagcaacaacaacaacaacaacaacaacaacaacaacagcaagctctaggttcacttgtacctcctgctgtcacaaggacagatacaagtgagactttggacgatatcaacgttcaaccttcttctgttttgcagttcggcaactctttacccagcgaatttttggttgcatccccagagcaattcaaagaatttttgttggactctccgtccaccaatttcaatttctttcacaaaactccggcaaagacaccacttcgatttgtaacagattctaacggtgctcagcaaagcaccacagagaacccaggtcaacaacagaatgtttttagcaatgtcgatttgaacaatcttttgaagagtaatggaaaaacaccctcatcttcatgcaccggcgcattttcacgcactcctctgagtaagattgacatgaatctcatgttcaatcaaccgctgccgacatctccatcaaaaaggttctcctccctgtcgttgacaccatatggaagaaaaattctgaatgacgtcggtacaccttatgcaaaagcattgatatcgtctaacagcgcgttagtggattttcagaaggcaagaaaggatattaccactaatgcaacatccatagggctggaaaatgccaacaacatcttacagagaacgccgctaagatctaacaataaaaaattatttattaaaaccccccaggataccatcaatagcactagcacactaactaaggacaacgaaaataaacaggacatatacggctcttcaccgactaccatccaattaaattcatcaataactaaatctatctccaaattggataactctagaattcccttgttagcttcgagatcagataacattctggattccaatgtggatgaccaattgtttgatttggggttgacaagattacctttatcaccaacaccaaattgtaattctttgcatagtacaaccacaggtacatctgccttacaaattcctgagctacccaagatggggtcttttagaagtgatacgggaatcaatccaatttcaagttcaaacacagtttcttttaagagcaaatcaggcaataataattcaaagggtcgaatcaaaaaaaatgggaagaaaccttccaaatttcaaattattgtggcaaatattgatcaatttaaccaggatacatcatcgtcatctttatcatcatcattgaatgcaagttcgagtgcagggaattcaaattcaaacgtaacaaagaaaagagcaagtaaactcaaaagatcacagtctttactttctgattccggatcgaaatcacaagcaaggaaaagctgtaattctaaatctaatggaaatttattcaattcacagtaa

SEQ ID NO: 10834 - DNA, 1665 bp, Artificial Sequence
  Description of Artificial Sequence: Synthetic polynucleotide
atggacagagatataagctaccagcaaaattatacctctactggggcaactgcaacttccagcagacagccctctacggacaataatgcagatacaaattttttgaaggtaatgtctgaattcaaatataattttaacagtccgttacctacaacgactcaattccccacgccctattcttctaatcagtatcaacagactcaagatcattttgccaatacagacgctcacaacagtagtagcaacgaaagttctttggtagagaacagtatattaccgcatcatcagcagatacaacagcaacaacaacaacaacaacaacaacaacaacaacagcaagctttgggttctcttgtacctcctgctgtcacaaggacagatacaagtgagactttggacgatatcaacgttcaaccttcttctgttttgcagttcggcaactctttacccagcgaatttttggttgcatccccagagcaattcaaagaatttttgttggactctccgtccaccaatttcaatttctttcacaaaactccggcaaagacaccacttagatttgtaacagattctaacggtgctcagcaaagcaccacagagaacccaggtcaacaacagaatgtttttagcaatgtcgatttgaacaatcttttgaagagtaatggaaaaacaccctcttctagttgcaccggcgcatttagccgcactcctttgagtaagattgacatgaatctcatgttcaatcaaccgttaccgacatctccatctaaaaggttctcctccttatctttgacaccatatggaagaaaaattttgaatgacgtcggtacaccttatgcaaaagcattgatatcttctaacagcgcgttagtggattttcagaaggcaagaaaggatattaccactaatgcaacatccatagggttggaaaatgccaacaacatcttacagagaacgccgttaagatctaacaataaaaaattatttattaaaaccccccaggataccatcaatagcactagcacattgactaaggacaacgaaaataaacaggacatatacggctcttctccgactaccatccaattaaattcttctataactaaatctatctccaaattggataactctagaattcccttgttagcttccagaagtgataacattttagattccaatgtggatgaccaattgtttgatttggggttgacaagattacctttatctccaacaccaaattgtaattctttgcatagtacaaccacaggtacatctgccttacaaattcctgagttgcccaagatggggtcttttagaagtgatacgggaatcaatccaatttccagtagtaacacagtttcttttaagagcaaatctggcaataataattctaagggtagaatcaaaaaaaatgggaagaaaccttccaaatttcaaattattgtggcaaatattgatcaatttaaccaggatacatcttcttcttctttatcttcttctttgaatgcaagtagtagtgcagggaatagtaatagcaacgtaacaaagaaaagagcaagtaaactcaaaagaagccagtctttactttctgattccggatctaaatctcaagcaaggaaaagctgtaattctaaatctaatggaaatttattcaattctcagtga

SEQ ID NO: 10835 - DNA, 2556 bp, Saccharomyces cerevisiae
atggatatggatacgcaggaggcagaactatcgagccagctggagaatcttacaataaattcaccacgaaagctacgctcgaacgcgcacagtaacagtggtaaagtgtttaaggaatatgaaagtaaccacgattttcaagattcaaattttacttcccaagttgtggaacctgcaatatccgattctgtcaaaaaacctcctacaatgacagttttgaacaactatagcacggtgcatcagaaagtgccgtcaggtttttcaggcacgactgctacatctcatcaagaagctcaatggaagcagtatttccctggtattggtagcggcggtggtaccaactttggtggcgctgttggtactgcaaacaaagttcctgaatcggatctcattgtgagcgacttggttaaggatttatctggagttcttgaaacaaatacatttaaaagacatttagatatgaagaataaaactactactatgcagacccatgaaaaccatgatacgattagtatttcacattctaaagatttctttaacgctgagaaggtctcatcgtcgttttctgatgacagcgattctggcccagcagctgaggcacatgatgtatttgatggcatattacaaaagcaaaaatcgaattatttggtgggttcttatccaagtaatagcaacaacaaaaacaataataataataataataataataataataatagtattaatattaataataaggataacgctagaacgaaggaggaggacgaagaggacacttccaattcttttgaattttcatcatcgtcatccatgtcgtcctctcaaactcaatcaggcagaaaatcaaaagttctcaagaaacctccattgaacactatttcacccggtcaattgggatatcagtttaaccatacacacggcgcatgggatccgccgctgaaccagggcttagatgtgtcgagttcacattctctggacaatacatcttccaaccagtcccagttcgccacaatggtaccaactggagataatcacactaacggtaaggcaccttcaattctagataagaaggcgtatgaattaaccagtaccaaaccaggtgatgttggctaccgccaaaagaaaatacaagaagaagaaaatctagcaaatagcgatgacacgcccctagacacaccaaaatttaatgacctttttacgaaaaatggcactagagcgaaggttaaaggacaaatgcgtacctctcgttcaatctctaattccaatctactagaagctcacaagaaactaaagaccttccccgctgaacgggttgaagatattacgtccatttccgaagtaaacacctcgttcaacgaaactgaaaagcagctaatatcaatcttgactagtaaactatctggttctccaagctatgattccgattgggaaaaaatcctgaaagttgacctatcaaggggcaaactgaagaatatgtttggcatgcaaagactactaccgaatgtattagtgctaaaccttagtgacaatgaaatgaacactctagaaggtataccctcgaacgttgtacagctattttgttcaaacaacaaaataacgagcgcacattgttcattagccggattccacgatctggaatgcctcgacttatcgtacaacctcttgaatacaagtttaaaatttttgtcactttgtcatcacctgcaagaggtgaacctttcttacaactccatccaatccttagaagggataggatcctccaggatgaaaaaactgaacctttctaacaacgagattaatggtatcatcgatttcgaacaattgatactaacaaacaactctgtcgtgggcggctggttgaccgtggaagtcttagatctaagcaacaataacataattggcgtaagaaacatcaattgcttgccccgcctgaaggttttaaacctcaatggtaacccgctagtttccatcgtggaatcttctaagatggagaacggaacgttgagagcgctttccatcaaaaatacaggaggcgcgctatccaaattacaaaattacaagttggatgatcaattcacgttcccctaccaaaatctaaagattctaaaactggacggcttcgctcaacttagcaaatggcaaaaatggcctgccactttgcaaattctggagatcaacggcggcctggcctcctctttgccgcgattctcttctctaaaatccaccaacttatattctctaactatagctaatgttagagacttcacacacttaccagtggacctctccaaggaactaccgttcttgcaagagctacatctgccaggcaacaacctacaaaacgcacacaagttaacaaaaactctcccacgccaatcagtaaaatttcttgatctacgaaataacccaatcacgacaccacgccacgatcgcgccagcacgagcttgcattaccggcagttgctccagcttgctggcctctgccagcagcaatgtcccgccctggcgaccctctggttagatgacactcctgccccaactgccacgaatctgtaa

SEQ ID NO: 10836 - DNA, 2556 bp, Artificial Sequence
  Description of Artificial Sequence: Synthetic polynucleotide
atggatatggatacgcaggaggcagaattatccagccagttggagaatcttacaataaattctccaagaaagttgcgctctaacgcgcacagtaacagtggtaaagtgtttaaggaatatgaaagtaaccacgattttcaagattctaattttacttcccaagttgtggaacctgcaatatccgattctgtcaaaaaacctcctacaatgacagttttgaacaactatagcacggtgcatcagaaagtgccgtctggtttttctggcacgactgctacatctcatcaagaagctcaatggaagcagtatttccctggtattggtagcggcggtggtaccaactttggtggcgctgttggtactgcaaacaaagttcctgaaagtgatctcattgtgagcgacttggttaaggatttatctggagttcttgaaacaaatacatttaaaagacatttagatatgaagaataaaactactactatgcagacccatgaaaaccatgatacgattagtatttctcattctaaagatttctttaacgctgagaaggtctcttcttctttttctgatgacagcgattctggcccagcagctgaggcacatgatgtatttgatggcatattacaaaagcaaaaatctaattatttggtgggttcttatccaagtaatagcaacaacaaaaacaataataataataataataataataataataatagtattaatattaataataaggataacgctagaacgaaggaggaggacgaagaggacacttccaattcttttgaattttcttcttcttcttccatgtcttcctctcaaactcaaagtggcagaaaatctaaagttctcaagaaacctccattgaacactatttctcccggtcaattgggatatcagtttaaccatacacacggcgcatgggatccgccgttgaaccagggcttagatgtgtccagttctcattctttggacaatacatcttccaaccagtcccagttcgccacaatggtaccaactggagataatcacactaacggtaaggcaccttctattttagataagaaggcgtatgaattaaccagtaccaaaccaggtgatgttggctaccgccaaaagaaaatacaagaagaagaaaatttggcaaatagcgatgacacgcccttagacacaccaaaatttaatgacctttttacgaaaaatggcactagagcgaaggttaaaggacaaatgcgtacctctcgttccatctctaattccaatttattggaagctcacaagaaattgaagaccttccccgctgaaagagttgaagatattacgtccatttccgaagtaaacaccagtttcaacgaaactgaaaagcagttgatatccatcttgactagtaaattatctggttctccaagctatgattccgattgggaaaaaatcttgaaagttgacttatctaggggcaaattgaagaatatgtttggcatgcaaagattattaccgaatgtattagtgttgaaccttagtgacaatgaaatgaacactttggaaggtataccctctaacgttgtacagttattttgttctaacaacaaaataacgagcgcacattgttctttagccggattccacgatttggaatgcctcgacttatcttacaacctcttgaatacaagtttaaaatttttgtctctttgtcatcacttgcaagaggtgaacctttcttacaactccatccaatccttagaagggataggatcctccaggatgaaaaaattgaacctttctaacaacgagattaatggtatcatcgatttcgaacaattgatattaacaaacaactctgtcgtgggcggctggttgaccgtggaagtcttagatttgagcaacaataacataattggcgtaagaaacatcaattgcttgccccgcttgaaggttttaaacctcaatggtaacccgttggtttccatcgtggaatcttctaagatggagaacggaacgttgagagcgctttccatcaaaaatacaggaggcgcgctttccaaattacaaaattacaagttggatgatcaattcacgttcccctaccaaaatttgaagattttgaaattagacggcttcgctcaacttagcaaatggcaaaaatggcctgccactttgcaaattttagagatcaacggcggcttggcctcctctttgccgcgcttctcttctttgaaatccaccaacttatattctttgactatagctaatgttagagacttcacacacttaccagtggacctctccaaggaattaccgttcttgcaagagttacatttaccaggcaacaacttacaaaacgcacacaagttaacaaaaactctcccacgccaaagtgtaaaatttcttgatttaagaaataacccaatcacgacaccacgccacgatcgcgccagcacgagcttgcattacagacagttgctccagcttgctggcctctgccagcagcaatgtcccgccttagcgaccctctggttagatgacactcctgccccaactgccacgaatttatga

SEQ ID NO: 10837 - DNA, 1560 bp, Saccharomyces cerevisiae
atgttcagtagatctacgctctgcttaaagacgtctgcatcctccattgggagacttcaattgagatatttctcacaccttcctatgacagtgcctatcaagctgcccaatgggttggaatatgagcaaccaacggggttgttcatcaacaacaagtttgttccttctaaacagaacaagaccttcgaagtcattaacccttccacggaagaagaaatatgtcatatttatgaaggtagagaggacgatgtggaagaggccgtgcaggccgccgaccgtgccttctctaatgggtcttggaacggtatcgaccctattgacaggggtaaggctttgtacaggttagccgaattaattgaacaggacaaggatgtcattgcttccatcgagactttggataacggtaaagctatctcttcctcgagaggagatgttgatttagtcatcaactatttgaaatcttctgctggctttgctgataaaattgatggtagaatgattgatactggtagaacccatttttcttacactaagagacagcctttgggtgtttgtgggcagattattccttggaatttcccactgttgatgtgggcctggaagattgcccctgctttggtcaccggtaacaccgtcgtgttgaagactgccgaatccaccccattgtccgctttgtatgtgtctaaatacatcccacaggcgggtattccacctggtgtgatcaacattgtatccgggtttggtaagattgtgggtgaggccattacaaaccatccaaaaatcaaaaaggttgccttcacagggtccacggctacgggtagacacatttaccagtccgcagccgcaggcttgaaaaaagtgactttggagctgggtggtaaatcaccaaacattgtcttcgcggacgccgagttgaaaaaagccgtgcaaaacattatccttggtatctactacaattctggtgaggtctgttgtgcgggttcaagggtgtatgttgaagaatctatttacgacaaattcattgaagagttcaaagccgcttctgaatccatcaaggtgggcgacccattcgatgaatctactttccaaggtgcacaaacctctcaaatgcaactaaacaaaatcttgaaatacgttgacattggtaagaatgaaggtgctactttgattaccggtggtgaaagattaggtagcaagggttacttcattaagccaactgtctttggtgacgttaaggaagacatgagaattgtcaaagaggaaatctttggccctgttgtcactgtaaccaaattcaaatctgccgacgaagtcattaacatggcgaacgattctgaatacgggttggctgctggtattcacacctctaatattaataccgccttaaaagtggctgatagagttaatgcgggtacggtctggataaacacttataacgatttccaccacgcagttcctttcggtgggttcaatgcatctggtttgggcagggaaatgtctgttgatgctttacaaaactacttgcaagttaaagcggtccgtgccaaattggacgagtaa

SEQ ID NO: 10838 - DNA, 1560 bp, Artificial Sequence
  Description of Artificial Sequence: Synthetic polynucleotide
atgttcagtagatctacgctctgcttaaagacgtctgcatcctccattgggagacttcaattgagatatttctctcaccttcctatgacagtgcctatcaagttgcccaatgggttggaatatgagcaaccaacggggttgttcatcaacaacaagtttgttccttctaaacagaacaagaccttcgaagtcattaacccttccacggaagaagaaatatgtcatatttatgaaggtagagaggacgatgtggaagaggccgtgcaggccgccgaccgtgccttctctaatgggtcttggaacggtatcgaccctattgacaggggtaaggctttgtacaggttagccgaattaattgaacaggacaaggatgtcattgcttccatcgagactttggataacggtaaagctatctcttccagcagaggagatgttgatttagtcatcaactatttgaaatcttctgctggctttgctgataaaattgatggtagaatgattgatactggtagaacccatttttcttacactaagagacagcctttgggtgtttgtgggcagattattccttggaatttcccattgttgatgtgggcctggaagattgcccctgctttggtcaccggtaacaccgtcgtgttgaagactgccgaatccaccccattgtccgctttgtatgtgtctaaatacatcccacaggcgggtattccacctggtgtgatcaacattgtatccgggtttggtaagattgtgggtgaggccattacaaaccatccaaaaatcaaaaaggttgccttcacagggtccacggctacgggtagacacatttaccagtccgcagccgcaggcttgaaaaaagtgactttggagttaggtggtaaatctccaaacattgtcttcgcggacgccgagttgaaaaaagccgtgcaaaacattatccttggtatctactacaattctggtgaggtctgttgtgcgggttctagggtgtatgttgaagaatctatttacgacaaattcattgaagagttcaaagccgcttctgaatccatcaaggtgggcgacccattcgatgaatctactttccaaggtgcacaaacctctcaaatgcaattgaacaaaatcttgaaatacgttgacattggtaagaatgaaggtgctactttgattaccggtggtgaaagattaggtagcaagggttacttcattaagccaactgtctttggtgacgttaaggaagacatgagaattgtcaaagaggaaatctttggccctgttgtcactgtaaccaaattcaaatctgccgacgaagtcattaacatggcgaacgattctgaatacgggttggctgctggtattcacacctctaatattaataccgccttaaaagtggctgatagagttaatgcgggtacggtctggataaacacttataacgatttccaccacgcagttcctttcggtgggttcaatgcatctggtttgggcagggaaatgtctgttgatgctttacaaaactacttgcaagttaaagcggtccgtgccaaattggacgagtga

SEQ ID NO: 10839 - DNA, 1365 bp, Saccharomyces cerevisiae
atgtcagagccagaatttcaacaagcttacgaagaagttgtctcctctttggaagactctactcttttcgaacaacacccagaatacagaaaggttttgccaattgtttctgttccagaaagaatcatacaattcagagtcacctgggaaaatgacaagggtgaacaagaagttgctcaaggttacagagtgcaatataactccgccaagggtccatacaagggtggtctacgtttccatccttccgtgaacttgtctatcttgaaattcttgggtttcgaacaaatcttcaagaactccttgaccggcctagacatgggtggtggtaaaggtggtctatgtgtggacttgaagggaagatctaataacgaaatcagaagaatctgttatgctttcatgagagaattgagcagacacattggtcaagacactgacgtgccagctggtgatatcggtgttggtggtcgtgaaattggttacctgttcggtgcttacagatcatacaagaactcctgggaaggtgtcttaaccggtaagggtttgaactggggtggttctttgatcagaccagaagccactggttacggtttagtttactatactcaagctatgatcgactatgccacaaacggtaaggaatctttcgaaggtaagcgcgtcaccatctctggtagtggtaacgttgctcaatacgctgccttgaaggttattgagctaggtggtactgtcgtttccctatctgactccaagggttgtatcatctctgaaactggtatcacctccgaacaagtcgctgatatttccagtgctaaggtcaacttcaagtccttggaacaaatcgtcaacgaatactctactttctccgaaaacaaagtgcaatacattgctggtgctcgtccatggacccacgtccaaaaggtcgacattgctttgccatgtgccacccaaaatgaagtcagcggtgaagaagccaaggccttggttgctcaaggtgtcaagtttattgccgaaggttccaacatgggttccactccagaagctattgccgtctttgaaactgctcgttccaccgccactggaccaagcgaagctgtttggtacggtccaccaaaggctgctaacttgggtggtgttgctgtttctggtttagaaatggcacaaaactctcaaagaatcacatggactagcgaaagagttgaccaagagttgaagagaattatgatcaactgtttcaatgaatgtatcgactatgccaagaagtacactaaggacggtaaggtcttgccatctttggtcaaaggtgctaatatcgcaagtttcatcaaggtctctgatgctatgtttgaccaaggtgatgtattttaa

SEQ ID NO: 10840 - DNA, 1365 bp, Artificial Sequence
  Description of Artificial Sequence: Synthetic polynucleotide
atgtctgagccagaatttcaacaagcttacgaagaagttgtctcctctttggaagactctactcttttcgaacaacacccagaatacagaaaggttttgccaattgtttctgttccagaaagaatcatacaattcagagtcacctgggaaaatgacaagggtgaacaagaagttgctcaaggttacagagtgcaatataactccgccaagggtccatacaagggtggtttacgtttccatccttccgtgaacttgtctatcttgaaattcttgggtttcgaacaaatcttcaagaactccttgaccggccttgacatgggtggtggtaaaggtggtttgtgtgtggacttgaagggaagatctaataacgaaatcagaagaatctgttatgctttcatgagagaattgagcagacacattggtcaagacactgacgtgccagctggtgatatcggtgttggtggtcgtgaaattggttaccttttcggtgcttacagatcttacaagaactcctgggaaggtgtcttaaccggtaagggtttgaactggggtggttctttgatcagaccagaagccactggttacggtttagtttactatactcaagctatgatcgactatgccacaaacggtaaggaatctttcgaaggtaagcgcgtcaccatctctggtagtggtaacgttgctcaatacgctgccttgaaggttattgagttaggtggtactgtcgtttccttatctgactccaagggttgtatcatctctgaaactggtatcacctccgaacaagtcgctgatatttccagtgctaaggtcaacttcaagtccttggaacaaatcgtcaacgaatactctactttctccgaaaacaaagtgcaatacattgctggtgctcgtccatggacccacgtccaaaaggtcgacattgctttgccatgtgccacccaaaatgaagtcagcggtgaagaagccaaggccttggttgctcaaggtgtcaagtttattgccgaaggttccaacatgggttccactccagaagctattgccgtctttgaaactgctcgttccaccgccactggaccaagcgaagctgtttggtacggtccaccaaaggctgctaacttgggtggtgttgctgtttctggtttagaaatggcacaaaactctcaaagaatcacatggactagcgaaagagttgaccaagagttgaagagaattatgatcaactgtttcaatgaatgtatcgactatgccaagaagtacactaaggacggtaaggtcttgccatctttggtcaaaggtgctaatatcgcaagtttcatcaaggtctctgatgctatgtttgaccaaggtgatgtattttga

SEQ ID NO: 10841 - DNA, 369 bp, Saccharomyces cerevisiae
atgaaaaacagaaaattttccaatcttctcttacttagattacgtatactttgctttaacaagaagccggcctttgctgctacttcttacgctttcttcttccgcaatttttcagtgctgattttcattatggtacctgatgaaaaagaaaacggcgcagcagctgataacagcttctctctgctgattggacgtggggtcgtactatttcttttttattgccccaccgcactgaaaatgcatgggccggttccggcgcattggttctgcgataagaatatcgaggccatccaatcagatggtcagataaggttattaagatcaggcccgtttccatggagtcatggaacctgcataaggggagcctga

SEQ ID NO: 10842 - DNA, 369 bp, Artificial Sequence
  Description of Artificial Sequence: Synthetic polynucleotide
atgaaaaacagaaaattttccaatcttctcttacttagattacgtatactttgctttaacaagaagccggcctttgctgctacttcttacgctttcttcttccgcaatttttctgtgttgattttcattatggtacctgatgaaaaagaaaacggcgcagcagctgataacagcttctctttattgattggacgtggggtcgtattatttcttttttattgccccaccgcattgaaaatgcatgggccggttccggcgcattggttctgcgataagaatatcgaggccatccaatctgatggtcagataaggttattaagaagcggcccgtttccatggagtcatggaacctgcataaggggagcctga

SEQ ID NO: 10843 - DNA, 156 bp, Saccharomyces cerevisiae
atgacattccatcttgggtggacaattttatggtataatcaagcgtatttagaagtttgggcgacagtatttcaagacgagatgcataagtattctcttcatcctcaatcccgcgatgctaaaacaaagttttgttgttgcattccatttaagtag

SEQ ID NO: 10844 - DNA, 156 bp, Artificial Sequence
  Description of Artificial Sequence: Synthetic polynucleotide
atgacattccatcttgggtggacaattttatggtataatcaagcgtatttagaagtttgggcgacagtatttcaagacgagatgcataagtattctcttcatcctcaatcccgcgatgctaaaacaaagttttgttgttgcattccatttaagtga

SEQ ID NO: 10845 - DNA, 1578 bp, Saccharomyces cerevisiae
atgaatgaaatcgatgagaaaaatcaggcccccgtgcaacaagaatgcctgaaagagatgattcagaatgggcatgctcggcgtatgggatctgttgaagatctgtatgttgctctcaacagacaaaacttatatcgaaacttctgcacatatggagaattgagtgattactgtactagggatcagctcacattagctttgagggaaatctgcctgaaaaatccaactcttttacatattgttctaccaacaagatggccaaatcatgaaaattattatcgcagttccgaatactattcacggccacatccagtgcatgattatatttcagtattacaagaattgaaactgagtggtgtggttctcaatgaacaacctgagtacagtgcagtaatgaagcaaatattagaagaattcaaaaatagtaagggttcctatactgcaaaaatttttaaacttactaccactttgactattccttactttggaccaacaggaccgagttggcggctaatttgtcttccagaagagcacacagaaaagtggaaaaaatttatctttgtatctaatcattgcatgtctgatggtcggtcttcgatccacttttttcatgatttaagagacgaattaaataatattaaaactccaccaaaaaaattagattacattttcaagtacgaggaggattaccaattattgaggaaacttccagaaccgatcgaaaaggtgatagactttagaccaccgtacttgtttattccgaagtcacttctttcgggtttcatctacaatcatttgagattttcttcaaaaggtgtctgtatgagaatggatgatgtggaaaaaaccgatgatgttgtcaccgagatcatcaatatttcaccaacagaatttcaagcgattaaagcaaatattaaatcaaatatccaaggtaagtgtactatcactccgtttttacatgtttgttggtttgtatctcttcataaatggggtaaatttttcaaaccattgaacttcgaatggcttacggatatttttatccccgcagattgccgctcacaactaccagatgatgatgaaatgagacagatgtacagatatggcgctaacgttggatttattgacttcaccccctggataagcgaatttgacatgaatgataacaaagaaaatttttggccacttattgagcactaccatgaagtaatttcggaagctttaagaaataaaaagcatctccatggcttagggttcaatatacaaggcttcgttcaaaaatatgtgaacattgacaaggtaatgtgcgatcgtgccatcgggaaaagacgcggaggtacattgttaagcaatgtaggtctgtttaatcagttagaggagcccgatgccaaatattctatatgcgatttggcatttggccaatttcaaggatcctggcaccaagcattttccttgggtgtttgttcgactaatgtaaaggggatgaatattgttgttgcttcaacaaagaatgttgttggtagtcaagaatctctcgaagagctttgctccatttacaaagctctccttttaggcccttag

SEQ ID NO: 10846 - DNA, 1578 bp, Artificial Sequence
  Description of Artificial Sequence: Synthetic polynucleotide
atgaatgaaatcgatgagaaaaatcaggcccccgtgcaacaagaatgcttgaaagagatgattcagaatgggcatgctcgtcgtatgggatctgttgaagatttatatgttgctctcaacagacaaaacttatatagaaacttctgcacatatggagaattgagtgattactgtactagggatcagctcacattagctttgagggaaatctgcttgaaaaatccaactcttttacatattgttttgccaacaagatggccaaatcatgaaaattattatcgcagttccgaatactattctagaccacatccagtgcatgattatattagtgtattacaagaattgaaattaagtggtgtggttctcaatgaacaacctgagtacagtgcagtaatgaagcaaatattagaagaattcaaaaatagtaagggttcctatactgcaaaaatttttaaacttactaccactttgactattccttactttggaccaacaggaccgagttggagattgatttgtcttccagaagagcacacagaaaagtggaaaaaatttatctttgtatctaatcattgcatgtctgatggtagatcttctatccacttttttcatgatttaagagacgaattaaataatattaaaactccaccaaaaaaattagattacattttcaagtacgaggaggattaccaattattgaggaaacttccagaaccgatcgaaaaggtgatagactttagaccaccgtacttgtttattccgaagtctcttctttctggtttcatctacaatcatttgagattttcttctaaaggtgtctgtatgagaatggatgatgtggaaaaaaccgatgatgttgtcaccgagatcatcaatatttctccaacagaatttcaagcgattaaagcaaatattaaatctaatatccaaggtaagtgtactatcactccgtttttacatgtttgttggtttgtatctcttcataaatggggtaaatttttcaaaccattgaacttcgaatggcttacggatatttttatccccgcagattgccgctctcaattaccagatgatgatgaaatgagacagatgtacagatatggcgctaacgttggatttattgacttcaccccctggataagcgaatttgacatgaatgataacaaagaaaatttttggccacttattgagcactaccatgaagtaatttctgaagctttaagaaataaaaagcatctccatggcttagggttcaatatacaaggcttcgttcaaaaatatgtgaacattgacaaggtaatgtgcgatcgtgccatcgggaaaagacgcggaggtacattgttaagcaatgtaggtttatttaatcagttagaggagcccgatgccaaatattctatatgcgatttggcatttggccaatttcaaggatcctggcaccaagcattttccttgggtgtttgttccactaatgtaaaggggatgaatattgttgttgcttctacaaagaatgttgttggtagtcaagaatctctcgaagagctttgctccatttacaaagctctccttttaggcccttga

SEQ ID NO: 10847 - DNA, 1548 bp, Saccharomyces cerevisiae
atgtcaactagctcctccgtaacgcagaaaaacttggatacaaacgcggaagccttgaaaaaggaggataaagtattatcagagtttgatattcaggatgagaggcctaaatcccttttatgggagagtgcctttgtcggagtgctgtgctctgcccaactaatgactcaggcaggacttggacaatcattagcgccgcttcacatcatcggtaacagttttggaacaacgaatgctggacaacttagttggtttgcttccgcatattcgctaactgttggtacattcattttaattgctggaagactcggagatatcttcggacacaagaaattctttgtccttggcttcttttggtacgcactttggtccttacttgctgggtttagcgtctactctaatcagattttttttgactgctgtcgtgcatttcaaggcatgggtccggcctttttgttgccaaatgccattgcgattctcggacgcacatataagccaggaagaagaaaaaacatggtctttagtctgtttggtgcttcagcacctggtggcttcttccttggggctgttttctcatccatgttgggtcaactggcgtggtggccatgggcttactggataatgggtattgcatgctttgttttagctgtagcaggttactttgtaatccctcacacccccatgccaagccgcgatgcctcatctttcaagttgttggaacgaatcgattttgcagggtcagttaccggcgttgttggattaattctctttaatttcgcttggaaccaaggccccgttgtgggttggcaaactccatacacatacgctcttttgatagttggtacctttttcttggttatttttgcatatatcgagtcccgagcagctttccctctgctaccatttgctgctctttctagtgatactgcttttgtacttagctgcatagctgcgggatgggccagctttggtatttggatattctatacatggcagttcatggaagactcaaggggccaaaccccccttctttctagtgcacagttttcacctgtagcaatcagtggattttgtgcagccgtgacgacaggtttccttctaagccatacacccccaagcacagttatgctttttgcgatgacagctttcacagtcggaactatattgattgctacggcccccgttcaccaaacgtattgggctcaaacgtttgtgtcaatcattgttatgccttggggaatggacatgtcctttccggccgctacaataatgcttagtgactcgatgccacacgaacatcaaggtcttgcagcctctttggttaatacggtggtaaactattcgatatcgataggtttgggtattgcaggtacaattgaatctagagtaaatgacggaggtgccaagcctttgaaaggatatcgttgttcgtggtacatgggcatcgggttgagcggacttggcatttttgtcgcagcaacgtatgcatggagcacttttatgaagtctaaaaaaaggatctccgaaaagcagcattttatagaataa

SEQ ID NO: 10848 - DNA, 1548 bp, Artificial Sequence
  Description of Artificial Sequence: Synthetic polynucleotide
atgtctactagctcctccgtaacgcagaaaaacttggatacaaacgcggaagccttgaaaaaggaggataaagtattatctgagtttgatattcaggatgagaggcctaaatcccttttatgggagagtgcctttgtcggagtgctttgctctgcccaattgatgactcaggcaggacttggacaatctttagcgccgcttcacatcatcggtaacagttttggaacaacgaatgctggacaacttagttggtttgcttccgcatattctttgactgttggtacattcattttaattgctggaagactcggagatatcttcggacacaagaaattctttgtccttggcttcttttggtacgcactttggtccttacttgctgggtttagcgtctactctaatcagattttttttgactgctgtcgtgcatttcaaggcatgggtccggcctttttgttgccaaatgccattgcgattctcggacgcacatataagccaggaagaagaaaaaacatggtctttagtttatttggtgcttctgcacctggtggcttcttccttggggctgttttctcttccatgttgggtcaattggcgtggtggccatgggcttactggataatgggtattgcatgctttgttttagctgtagcaggttactttgtaatccctcacacccccatgccaagccgcgatgcctcttctttcaagttgttggaaagaatcgattttgcagggtctgttaccggcgttgttggattaattctctttaatttcgcttggaaccaaggccccgttgtgggttggcaaactccatacacatacgctcttttgatagttggtacctttttcttggttatttttgcatatatcgagtccagagcagctttccctttattaccatttgctgctctttctagtgatactgcttttgtacttagctgcatagctgcgggatgggccagctttggtatttggatattctatacatggcagttcatggaagacagcaggggccaaaccccccttctttctagtgcacagttttctcctgtagcaatcagtggattttgtgcagccgtgacgacaggtttccttttgagccatacacccccaagcacagttatgctttttgcgatgacagctttcacagtcggaactatattgattgctacggcccccgttcaccaaacgtattgggctcaaacgtttgtgtccatcattgttatgccttggggaatggacatgtcctttccggccgctacaataatgcttagtgactccatgccacacgaacatcaaggtcttgcagcctctttggttaatacggtggtaaactattctatatccataggtttgggtattgcaggtacaattgaatctagagtaaatgacggaggtgccaagcctttgaaaggatatcgttgttcttggtacatgggcatcgggttgagcggacttggcatttttgtcgcagcaacgtatgcatggagcacttttatgaagtctaaaaaaaggatctccgaaaagcagcattttatagaatga

SEQ ID NO: 10849 - DNA, 1641 bp, Saccharomyces cerevisiae
atggcatccccaggatcgacagcattaccacacaagcgacaaagagtccgaaaggcttgcgtgccctgtagggaacgtaaaaggaaatgtaatggcaaatctccatgtgaaatgtgcgttgcctatggatatgtatgtcattatattgacggtcgtgtcccttcggcatcacctcaagtgcaacaagtaggtgaaacatctcctgatacggagagcagaccttttgttcttccgggtatacatagaaacgaacaaccgcagcctataaatacacagaacgttacaagtcaaaacattgtagatccaactaagtctaggtacacgatccagcactctgcagttgctttcccccgctgtcttggtctcgaactccgatcaactaatcctccacgcctacattccttcgcttggcattgcggaatcagaccggaagaaaatccaaactcacatgtccttctttctgatttagttacaaaggaagagtattaccgtatctcaaaagtttatttttcagttgttcacccgatatttgatgttgttaatccagagcaactggcaaagaatgttgaaaaatactgggatggcgacgtaaaaaccttagagtatggggctgttattgcaggggtgatagctttaggatcattttttatgggaagtcttggccatccccgagagatggatatagtacaatatgccaaagggatccttgatgacccgactttcagtcgcattcccacggtggagcaagtctccgcatgggttttgcgcaccatttacctgcgagccacttcgaggccccatgtagcatggttagctagctgcgtaaccatccatctttctgaggcaattggcctgcatcatgagattgacagagaggatatagcgatatcgaacaacgttccaccaaaaagaactactgtagtgagcgaacacactagaagattattttggtgtgcatggtcaatcaataccattctttcatatgactatgggcgctcaagtgttacgctgaatagaattacttgcaagccagttaaggagacggacggtaattttacagctcatttagtcgcgttagcacacctgattccccaagacagcgtgaacgcaaacgcagcgcaattgttgcaggccctggcggccgttcatgaatcaccaaacgcacatccgtttttgtcgttgaccaagggtgatatatgcctctctttgtatagaagacttcgtttgctgaatcatattcttgataaaaatgttgttttacaaataattgatatcggcaacactgcgctatcagcagcatacgctcttgtaaaactggatcaagcatggtggaatgtgttgagcacctcattccagtacgtctgtgtccttcttgccatcgacacaccggaaagtctttcacatgttgctactgccatgaaaacgttagataatattactcaaattctcggtacacgtattgcttttgaagcacaaaagaccgcaaaactgcttcttgaggattccatgaaaaaaaaaagacaagaaattcagcagcttgagcaggcaactcaccagagatctaatcttgaaactactcacctactcgatattgactgggatgctttgctagatccatcagacacgttaaactttatgtaa

SEQ ID NO: 10850 - DNA, 1641 bp, Artificial Sequence
  Description of Artificial Sequence: Synthetic polynucleotide
atggcatccccaggaagtacagcattaccacacaagagacaaagagtcagaaaggcttgcgtgccctgtagggaacgtaaaaggaaatgtaatggcaaatctccatgtgaaatgtgcgttgcctatggatatgtatgtcattatattgacggtcgtgtcccttctgcatctcctcaagtgcaacaagtaggtgaaacatctcctgatacggagagcagaccttttgttcttccgggtatacatagaaacgaacaaccgcagcctataaatacacagaacgttacaagtcaaaacattgtagatccaactaagtctaggtacacgatccagcactctgcagttgctttcccccgctgtcttggtctcgaactcagatctactaatcctccacgcttgcattccttcgcttggcattgcggaatcagaccggaagaaaatccaaactctcatgtccttctttctgatttagttacaaaggaagagtattaccgtatctccaaagtttatttttctgttgttcacccgatatttgatgttgttaatccagagcaattggcaaagaatgttgaaaaatactgggatggcgacgtaaaaaccttagagtatggggctgttattgcaggggtgatagctttaggaagtttttttatgggaagtcttggccatcccagagagatggatatagtacaatatgccaaagggatccttgatgacccgactttcagtcgcattcccacggtggagcaagtctccgcatgggttttgcgcaccatttacttaagagccacttctaggccccatgtagcatggttagctagctgcgtaaccatccatctttctgaggcaattggcttgcatcatgagattgacagagaggatatagcgataagcaacaacgttccaccaaaaagaactactgtagtgagcgaacacactagaagattattttggtgtgcatggtctatcaataccattctttcctatgactatgggcgcagtagtgttacgttgaatagaattacttgcaagccagttaaggagacggacggtaattttacagctcatttagtcgcgttagcacacttgattccccaagacagcgtgaacgcaaacgcagcgcaattgttgcaggccttagcggccgttcatgaatctccaaacgcacatccgtttttgtctttgaccaagggtgatatatgcctctctttgtatagaagacttcgtttgttgaatcatattcttgataaaaatgttgttttacaaataattgatatcggcaacactgcgttaagtgcagcatacgctcttgtaaaattggatcaagcatggtggaatgtgttgagcaccagtttccagtacgtctgtgtccttcttgccatcgacacaccggaaagtctttctcatgttgctactgccatgaaaacgttagataatattactcaaattctcggtacacgtattgcttttgaagcacaaaagaccgcaaaattacttcttgaggattccatgaaaaaaaaaagacaagaaattcagcagcttgagcaggcaactcaccagagatctaatcttgaaactactcacctcctcgatattgactgggatgctttgttggatccatctgacacgttaaactttatgtga

SEQ ID NO: 10851 - DNA, 2136 bp, Saccharomyces cerevisiae
atgtattgggtcctcctttgtggttctattttgttatgctgcttgtcaggagcaagcgcctcccctgctaagacaaaaatgtacggcaagttaccactggttttgacagatgcctgcatgggagttctcggcgaagtaacctgggagtatagtagtgacgatttatattcctcaccagcatgtacatatgaaccggcattacagtcaatgttgtattgtatttacgaatcattgaatgaaaagggttattccaatagaacctttgaaaaaacctttgctgctatcaaagaagactgcgcatattacactgataaccttcagaatatgactaatgcagatttctataatatgctgaataatggaacaacatacataatacagtattctgaaggtagcgcgaatcttacgtatccaatcgagatggatgcccaagtgagagaaaactattattattcttaccatggtttctacgccaactacgacattggtcatacttatggtggtattatttgcgcctattttgtaggtgttatgattcttgccagcatactccattatctaagttacactccgtttaaaactgccttatttaaacaaagacttgtaagatatgtgagaagatatttgacaatacctactatctggggtaaacatgcgtcgagcttttcttaccttaaaatttttacaggcttccttcccacacgatctgaaggcgtcattatacttggatacctcgtgcttcatacagtttttctggcatacgggtatcaatatgatccttacaacttaattttcgactctcgtagagaacagattgctcgatacgtggcagatagaagtggtgtcctggcatttgcacattttcccctaatagctcttttcgcaggaaggaacaattttctagaattcatttctggagtaaaatatacctctttcataatgtttcataagtggttgggaagaatgatgtttttagatgctgtgattcatggcgctgcttataccagttattccgtattctacaaagattgggcagcaagcaaggaagagacatattggcaatttggagtagctgctctttgtatagttggtgttatggtgtttttttctttggcaatgttcagaaagtttttctatgaagccttcttatttctccatattgtgcttggcgcattgttcttttatacgtgttgggagcacgtcgtagaattgagtgggattgagtggatatacgctgctattgctatctggactattgataggctaattcgaattgttagagtatcttatttcggtttccctaaggcttccttacagttagttggcgatgacatcattcgagtcacagtcaaacgaccagtaaggctatggaaagccaaaccaggacagtatgttttcgtttcattcctacaccacctgtatttttggcagtcacatcctttcacagtcttagattcaattatcaaagatggtgagctgactattatcctgaaggaaaaaaagggagtaacaaaacttgtcaaaaagtatgtgtgttgcaatggaggtaaggcatctatgagactagctatagaaggtccatatggctcttcatctccagtcaataattatgataacgtcttgctacttacgggaggtactggtttgccagggcccattgcacacgccattaaacttggaaaaacgtcagcggcaactggaaaacaattcataaaattagtgattgcagttagagggtttaacgtactcgaggcttacaagccggagctgatgtgtctagaagatcttaatgtacagcttcacatctacaatacaatggaagttccggcattaactcctaatgatagtttggaaatttctcaacaagacgagaaggccgatggaaaaggtgttgttatggcaactaccctagaacagtcacctaatccagttgaatttgatggtactgtttttcatcatggaagacccaatgttgaaaagcttctgcatgaagttggtgacctaaatggatcgttagctgtggtttgttgtgggcctcctgttttcgttgacgaagtaagggatcaaacggcaaatcttgttctagagaagcctgcaaaggcaatcgaatactttgaagaataccaaagttggtaa

SEQ ID NO: 10852 - DNA, 2136 bp, Artificial Sequence
  Description of Artificial Sequence: Synthetic polynucleotide
atgtattgggtcctcctttgtggttctattttgttatgctgcttgagtggagcaagcgcctcccctgctaagacaaaaatgtacggcaagttaccattagttttgacagatgcctgcatgggagttctcggcgaagtaacctgggagtatagtagtgacgatttatattcctctccagcatgtacatatgaaccggcattacagtccatgttgtattgtatttacgaatctttgaatgaaaagggttattccaatagaacctttgaaaaaacctttgctgctatcaaagaagactgcgcatattacactgataaccttcagaatatgactaatgcagatttctataatatgttgaataatggaacaacatacataatacagtattctgaaggtagcgcgaatcttacgtatccaatcgagatggatgcccaagtgagagaaaactattattattcttaccatggtttctacgccaactacgacattggtcatacttatggtggtattatttgcgcctattttgtaggtgttatgattcttgccagcatactccattatttgagttacactccgtttaaaactgccttatttaaacaaagacttgtaagatatgtgagaagatatttgacaatacctactatctggggtaaacatgcgtccagcttttcttaccttaaaatttttacaggcttccttcccacaagatctgaaggcgtcattatacttggatacctcgtgcttcatacagtttttttggcatacgggtatcaatatgatccttacaacttaattttcgactctcgtagagaacagattgctagatacgtggcagatagaagtggtgtcttggcatttgcacattttcccttgatagctcttttcgcaggaaggaacaattttttggaattcatttctggagtaaaatatacctctttcataatgtttcataagtggttgggaagaatgatgtttttagatgctgtgattcatggcgctgcttataccagttattccgtattctacaaagattgggcagcaagcaaggaagagacatattggcaatttggagtagctgctctttgtatagttggtgttatggtgtttttttctttggcaatgttcagaaagtttttctatgaagccttcttatttctccatattgtgcttggcgcattgttcttttatacgtgttgggagcacgtcgtagaattgagtgggattgagtggatatacgctgctattgctatctggactattgataggttgattagaattgttagagtatcttatttcggtttccctaaggcttccttacagttagttggcgatgacatcattcgtgtcacagtcaaaaggccagtaaggctttggaaagccaaaccaggacagtatgttttcgtttctttcttgcaccacttgtatttttggcagtctcatcctttcacagtcttagattctattatcaaagatggtgagttaactattatcttgaaggaaaaaaagggagtaacaaaacttgtcaaaaagtatgtgtgttgcaatggaggtaaggcatctatgagattggctatagaaggtccatatggctcttcttctccagtcaataattatgataacgtcttgttacttacgggaggtactggtttgccagggcccattgcacacgccattaaacttggaaaaacgtctgcggcaactggaaaacaattcataaaattagtgattgcagttagagggtttaacgtactcgaggcttacaagccggagttgatgtgtttagaagatcttaatgtacagcttcacatctacaatacaatggaagttccggcattaactcctaatgatagtttggaaatttctcaacaagacgagaaggccgatggaaaaggtgttgttatggcaactaccttagaacagtctcctaatccagttgaatttgatggtactgtttttcatcatggaagacccaatgttgaaaagcttttacatgaagttggtgacttgaatggatctttagctgtggtttgttgtgggcctcctgttttcgttgacgaagtaagggatcaaacggcaaatcttgttttggagaagcctgcaaaggcaatcgaatactttgaagaataccaaagttggtga

SEQ ID NO: 10853 - DNA, 168 bp, Saccharomyces cerevisiae
atgttcaatgtagcattaccatcacaagacaaaaaatcagaattttacaagcaaaagcgcttatctttaaggaccaacatattagatgaattcttaagggttgccaaaacgcaagacaacaggcaaaataatttcgtttctcagtaccgaaatgacgaaatatactga

SEQ ID NO: 10854 - DNA, 168 bp, Artificial Sequence
  Description of Artificial Sequence: Synthetic polynucleotide
atgttcaatgtagcattaccatctcaagacaaaaaaagtgaattttacaagcaaaagcgcttatctttaaggaccaacatattagatgaattcttaagggttgccaaaacgcaagacaacaggcaaaataatttcgtttctcagtacagaaatgacgaaatatactga

SEQ ID NO: 10855 - DNA, 462 bp, Saccharomyces cerevisiae
atgaaattctcaactattttcggagctactacagttatgactgccgtctcggcagcagctgtgtcgagtgtaatgaccactaagactattactgctactaacggtaataacgtttacactaaggtcgttaccgacaccgctgaccctatcattagttacagtaccactagaactgtcgttgtcagtaatagtgatgctacttacacaaaggttgtcaccgaaggaccagataccacctctgaaaagagtacaacaaagacacttactttgacaaacggttcaggttcatcaaccaacctttacaccaagaccgtcactcaagccgtcgaatcatctacatcctcctcatcctcctcatcctcctcctcctcttctgcctcttcttctggtgctgctcctgctgcattccaaggagcaagtgtcggtgcattggcccttggtttgatttcttacctattataa

SEQ ID NO: 10856 - DNA, 462 bp, Artificial Sequence
  Description of Artificial Sequence: Synthetic polynucleotide
atgaaattctctactattttcggagctactacagttatgactgccgtctctgcagcagctgtgtccagtgtaatgaccactaagactattactgctactaacggtaataacgtttacactaaggtcgttaccgacaccgctgaccctatcattagttacagtaccactagaactgtcgttgtcagtaatagtgatgctacttacacaaaggttgtcaccgaaggaccagataccacctctgaaaagagtacaacaaagacacttactttgacaaacggttctggttcttccaccaacctttacaccaagaccgtcactcaagccgtcgaaagctctacatcctcctcctcctcctcctcctcctcctcctcttctgcctcttcttctggtgctgctcctgctgcattccaaggagcaagtgtcggtgcattggcccttggtttgatttcttacttattatga

SEQ ID NO: 10857 - DNA, 615 bp, Saccharomyces cerevisiae
atgaaattctcttccgctttggttctatctgctgttgccgctactgctcttgctgagagtatcaccaccaccatcactgccaccaagaacggtcatgtctacactaagactgtcacccaagatgctacttttgtttggggtggtgaagactcttacgccagcagcacttctgccgctgaatcttctgccgccgaaacttctgccgccgaaacctctgctgccgctaccacttctgctgccgctaccacttctgctgctgagacttcttctgctgctgagacttcttctgctgatgaaggttctggttctagtatcactaccactatcactgccaccaagaacggtcacgtctacactaagactgtcacccaagatgctacttttgtctggactggtgaaggcagcagcaacacctggtctccaagtagtacttctaccagctcagaagctgctacctcttctgcttcaaccactgcaaccaccactgctgaaacttcttcctctgctacatcctctagcaccgctgaattatctagttacaccggtgctgctgatgccatcaccgctggtactggtttgatgggtgctgcccttgctgccgtcatgttattgtaa

SEQ ID NO: 10858 - DNA, 615 bp, Artificial Sequence
  Description of Artificial Sequence: Synthetic polynucleotide
atgaaattctcttccgctttggttttatctgctgttgccgctactgctcttgctgagagtatcaccaccaccatcactgccaccaagaacggtcatgtctacactaagactgtcacccaagatgctacttttgtttggggtggtgaagactcttacgccagcagcacttctgccgctgaatcttctgccgccgaaacttctgccgccgaaacctctgctgccgctaccacttctgctgccgctaccacttctgctgctgagacttcttctgctgctgagacttcttctgctgatgaaggttctggttctagtatcactaccactatcactgccaccaagaacggtcacgtctacactaagactgtcacccaagatgctacttttgtctggactggtgaaggcagcagcaacacctggtctccaagtagtacttctaccagctctgaagctgctacctcttctgctagcaccactgcaaccaccactgctgaaacttcttcctctgctacatcctctagcaccgctgaattatctagttacaccggtgctgctgatgccatcaccgctggtactggtttgatgggtgctgcccttgctgccgtcatgttattgtga

SEQ ID NO: 10859 - DNA, 2085 bp, Saccharomyces cerevisiae
atgcttttcgctagattagtgctgctgttggtgtatttggcaccaggttctttagcaaaaccagcatcaactaagaaaagaacgcaatgggaccagatagcaattgatgcttgtgctaaagaattggaatcacacaaatttgacacggatgtgaagggtcggcacgctactctttgcacttatgaaccagcactagggtcttggttacattgcgcgaaggatgttctcgacagtaggaagaaaagtaaaaaaatattcgaaaaaacgtttagcaaaattaatcagtattgccacgattatcacaaagatgaggtcgtcagcaatgaggagtattatcgaatttttgccaatgcatcccttttcatccggcctcttgatgaggtaaaggaaaacatacgatatcccgtcactcccaataaagcctctctagataggtgggtatgggcttattttgggcccctggataatatagacaaaggaaatgtttatggagtgacgatttgcttatactggataggagttctgtttattgcagctgtatatcacttcttgaacttttctcgacttaaacaaacggtgttcaaaaacaaggtgtctgctttcttaagaggccactatgttcttccagcgcttgttcataaccatgctatgtcagtgggaaggtggtttttcatcggtctggtccctaccaggttagagacccttgtcctattcggttacgttttgttgcacgggttcttgttgagtagttacaattttgaccataatgagttgctcagtgatcgcagaagccaagtgcttatcttcctttccgacagggcagggatcctggcattcgcacattttcctttgatagttctctttggcggtaaaaacagcacaatgacttggctcacaggtataagatataccgcattcattacttaccacaaatggttaggaagattcatgttagtagactgtacgatccatgcaataggatacacctaccatgcatacatagaaaattactggaaatacgtgaagtatagtgatctatggacatccggaagacatgccatgatcattgttggaatacttgtgtttttttcgttcttcttctttagacgacattattacgaattgtttgttattacgcacattatcttagcaataggatttttccatgcgtgctggaaacattgctataaacttggatggggtgaatggataatggcgtgtgcactgttttggattgctgaccgtattctgcggctaataaagattgcaatttttggaatgccatgggctaaattgaaactgtgtggcgagtccatgatagaagtgagaatctcaaaaagctccaaatggtggaaagcagaacctggccaatatatatatctgtacttcttaagaccaaaaatattctggcaatcacatccattcacggtcatggattctttggttgaggatggtgagttggtagttgtgataacagtgaaaaatgggctaaccaaaaaattacaggaataccttttagagagcgaagggtacacggaaatgcgagtactagcagaaggaccttatggacaaagcacgcgaacacatttgttcgaaagcctcctgtttattgccggaggggcgggtgttcctggacctctgtcgatggcaataaaggcaggtcgccaggtcaaaagcaacgattctcatcaaatgatcaaatttgtgtggagtgtacgtaaccttgatctcttagaagtgtatcgcaaagagataatggtgctaaaagagttgaacatagacacaaaaatttacttcacaggagagcgaaaagatgaatcgaacacggaggagggagcaattgctaatatgagcacggaaggcagactgctgacgacatcgaaatcagcggaaatgattactgattttggacgaccaaatatcgatgagataattgaagaagcagtaagtggtgcaaaatctttgttggtcacttgttgcgggtcagagggctttgtagacaagacacgagagttgacggcaaaaagagttcttgaacacggtgacaaatggatagaatacgtggaggaattccagaattggtag

SEQ ID NO: 10860 - DNA, 2085 bp, Artificial Sequence
  Description of Artificial Sequence: Synthetic polynucleotide
atgcttttcgctagattagtgttgttgttggtgtatttggcaccaggttctttagcaaaaccagcatctactaagaaaagaacgcaatgggaccagatagcaattgatgcttgtgctaaagaattggaatctcacaaatttgacacggatgtgaagggtagacacgctactctttgcacttatgaaccagcattggggtcttggttacattgcgcgaaggatgttctcgacagtaggaagaaaagtaaaaaaatattcgaaaaaacgtttagcaaaattaatcagtattgccacgattatcacaaagatgaggtcgtcagcaatgaggagtattatagaatttttgccaatgcatcccttttcatcagacctcttgatgaggtaaaggaaaacataagatatcccgtcactcccaataaagcctctttagataggtgggtatgggcttattttgggcccttagataatatagacaaaggaaatgtttatggagtgacgatttgcttatactggataggagttttatttattgcagctgtatatcacttcttgaacttttctaggcttaaacaaacggtgttcaaaaacaaggtgtctgctttcttaagaggccactatgttcttccagcgcttgttcataaccatgctatgtctgtgggaaggtggtttttcatcggtttggtccctaccaggttagagacccttgtccttttcggttacgttttgttgcacgggttcttgttgagtagttacaattttgaccataatgagttgctcagtgatcgcagaagccaagtgcttatcttcctttccgacagggcagggatcttggcattcgcacattttcctttgatagttctctttggcggtaaaaacagcacaatgacttggctcacaggtataagatataccgcattcattacttaccacaaatggttaggaagattcatgttagtagactgtacgatccatgcaataggatacacctaccatgcatacatagaaaattactggaaatacgtgaagtatagtgatttatggacatccggaagacatgccatgatcattgttggaatacttgtgtttttttctttcttcttctttagaagacattattacgaattgtttgttattacgcacattatcttagcaataggatttttccatgcgtgctggaaacattgctataaacttggatggggtgaatggataatggcgtgtgcattattttggattgctgaccgtattttaaggttgataaagattgcaatttttggaatgccatgggctaaattgaaattatgtggcgagtccatgatagaagtgagaatctccaaaagctccaaatggtggaaagcagaacctggccaatatatatatttgtacttcttaagaccaaaaatattctggcaatctcatccattcacggtcatggattctttggttgaggatggtgagttggtagttgtgataacagtgaaaaatgggttaaccaaaaaattacaggaataccttttagagagcgaagggtacacggaaatgagagtattggcagaaggaccttatggacaaagcacgagaacacatttgttcgaaagcctcttatttattgccggaggggcgggtgttcctggacctttatctatggcaataaaggcaggtcgccaggtcaaaagcaacgattctcatcaaatgatcaaatttgtgtggagtgtacgtaaccttgatctcttagaagtgtatcgcaaagagataatggtgttgaaagagttgaacatagacacaaaaatttacttcacaggagagagaaaagatgaatctaacacggaggagggagcaattgctaatatgagcacggaaggcagattattgacgacaagtaaatctgcggaaatgattactgattttggaagaccaaatatcgatgagataattgaagaagcagtaagtggtgcaaaatctttgttggtcacttgttgcgggagtgagggctttgtagacaagacaagagagttgacggcaaaaagagttcttgaacacggtgacaaatggatagaatacgtggaggaattccagaattggtga

SEQ ID NO: 10861 - DNA, 873 bp, Saccharomyces cerevisiae
atgcgtggtttcagtggtcaaccattgagtgatgatgataattatagaattgaaaagactcaaaggaacacaattcctgaacgtctccattttagcagagagagaaatatgcccattgcaagtatattcgggactagaggatattttgtattctcaagtgagcaatcctatgacaaattcaaacagacaaactttaatatcagtactctagatgcggatggtgtaggtgttcctctttttcatattgtccaaagttataacgttattggcaaaattactcggagctcgccggatttctatatctacaagtacgttttacaaggggtgcaagatccgcctttatactctgattgtaaagttatttgtcaagataaagtttttcgtttatgcaaaattttatattgtgaaatttatgctcatcaaggattttttgaaactaaatacgatttcttctatccttctaaaacgcagccggtcaaaaaataccaaataatcaaacaaagtaatatgcgagatctatattccactttggacggtatgcgttttcgttggcatgtgaaattctacagcgatcattttcgattgatgttcctagatgaggacaggctcaattactcaaatagtaaccaaaaggaaaggcaaaaaccagatcaaggaaaaagtaaggctccagatttcgtaattggccattatacaagaactttttccgatatactccctagatccacgtcaaaatgctccaatcttattattggagaacactcaaagccagactctcttggtatcacgaccgttcctgatttgactcaggaatttgcctgtcagggagctttaatccattatctgctgcatatagaacgagaaagaaaataa

SEQ ID NO: 10862 - DNA, 873 bp, Artificial Sequence
  Description of Artificial Sequence: Synthetic polynucleotide
atgcgtggtttcagtggtcaaccattgagtgatgatgataattatagaattgaaaagactcaaaggaacacaattcctgaacgtctccattttagcagagagagaaatatgcccattgcaagtatattcgggactagaggatattttgtattctctagtgagcaatcctatgacaaattcaaacagacaaactttaatatcagtactttagatgcggatggtgtaggtgttcctctttttcatattgtccaaagttataacgttattggcaaaattactagaagctctccggatttctatatctacaagtacgttttacaaggggtgcaagatccgcctttatactctgattgtaaagttatttgtcaagataaagtttttcgtttatgcaaaattttatattgtgaaatttatgctcatcaaggattttttgaaactaaatacgatttcttctatccttctaaaacgcagccggtcaaaaaataccaaataatcaaacaaagtaatatgagagatttatattccactttggacggtatgcgttttcgttggcatgtgaaattctacagcgatcattttagattgatgttcttggatgaggacaggctcaattactctaatagtaaccaaaaggaaaggcaaaaaccagatcaaggaaaaagtaaggctccagatttcgtaattggccattatacaagaactttttccgatatactccctagatccacgtccaaatgctccaatcttattattggagaacactccaagccagactctcttggtatcacgaccgttcctgatttgactcaggaatttgcctgtcagggagctttaatccattatttattacatatagaaagagaaagaaaatga

SEQ ID NO: 10863 - DNA, 1698 bp, Saccharomyces cerevisiae
atgaaaagaacggtaatatcttcctcgaacgcatatgctagtaagagatctcggctggatatagaacatgattttgaacaataccactcgttgaacaaaaaatattatccaaggccaattactaggacaggcgcaaatcaattcaataataagtctcgggctaaaccaatggagattgtggaaaaactgcaaaagaagcaaaaaacgtcgtttgagaatgttagcactgtcatgcactggtttcgaaatgatctacgtttatatgataatgtgggactgtacaaaagtgttgcgctcttccagcaattgaggcaaaaaaacgcaaaagccaaattatatgctgtttatgtcatcaatgaagatgattggagagcccatatggatagcggatggaaattgatgtttataatgggggcgttaaaaaatttgcagcagtccttagccgaattacacatacctcttcttctgtgggaattccacactccaaaaagtaccttatctaattcaaaagagttcgtggagtttttcaaagaaaaatgtatgaatgtaagttcaggaacaggtacgataatcactgctaatatagaataccaaacagatgaactgtaccgtgatattaggctgttagaaaatgaagaccatagattgcaattgaaatactaccacgactcttgcattgttgctcctggattgatcactactgacagaggcaccaactattctgtgtttactccatggtacaaaaaatgggtgctatatgtaaataattacaaaaagagtacctctgaaatttgtcatttgcatataatcgaaccattaaagtacaacgaaacttttgaactgaagccattccaatattcattaccggatgaattccttcaatatatacctaaatcaaaatggtgcttgccagacgtttctgaagaagcagctttatccagattaaaagatttcctcggtacaaaaagttctaagtacaacaatgaaaaagacatgctatatttgggtggaacctctgggctaagtgtatatataactactggtaggataagcacaagacttatagtcaaccaggcatttcaatcatgcaacggacaaataatgtcaaaagcactgaaagataattcgtccacccaaaatttcatcaaagaagttgcatggagagatttttacagacattgtatgtgcaactggccatatacctcaatgggaatgccttatcgattggacactttagatataaaatgggagaataaccctgtagcatttgaaaagtggtgtactggtaatacaggcattcccatagtcgatgccataatgagaaaattactgtacacaggctatattaataacagatctagaatgatcacagcttcttttctttctaaaaacttattaatagattggagatggggggaacgctggtttatgaaacacttgatagacggtgattcgtcttcaaatgttggtggctggggtttttgttctagtacaggaattgatgcccaaccatattttagagtttttaatatggatatacaagcaaaaaaatatgacccacaaatgatattcgtcaaacaatgggttcccgaattgatttcttccgaaaataagcgtccagaaaactatccaaaacctttagttgatttaaagcatagtagggagcgtgctttgaaagtttataaagacgcaatgtga

SEQ ID NO: 10864 - DNA, 1698 bp, Artificial Sequence
  Description of Artificial Sequence: Synthetic polynucleotide
atgaaaagaacggtaatatcttccagtaacgcatatgctagtaagagatctaggttagatatagaacatgattttgaacaataccactctttgaacaaaaaatattatccaaggccaattactaggacaggcgcaaatcaattcaataataagtctagagctaaaccaatggagattgtggaaaaattacaaaagaagcaaaaaacgtcttttgagaatgttagcactgtcatgcactggtttagaaatgatttacgtttatatgataatgtgggattatacaaaagtgttgcgctcttccagcaattgaggcaaaaaaacgcaaaagccaaattatatgctgtttatgtcatcaatgaagatgattggagagcccatatggatagcggatggaaattgatgtttataatgggggcgttaaaaaatttgcagcagtccttagccgaattacacatacctcttcttttatgggaattccacactccaaaaagtaccttatctaattctaaagagttcgtggagtttttcaaagaaaaatgtatgaatgtaagtagtggaacaggtacgataatcactgctaatatagaataccaaacagatgaattataccgtgatattaggttattagaaaatgaagaccatagattgcaattgaaatactaccacgactcttgcattgttgctcctggattgatcactactgacagaggcaccaactattctgtgtttactccatggtacaaaaaatgggtgctttatgtaaataattacaaaaagagtacctctgaaatttgtcatttgcatataatcgaaccattaaagtacaacgaaacttttgaattgaagccattccaatattctttaccggatgaattccttcaatatatacctaaatctaaatggtgcttgccagacgtttctgaagaagcagctttatccagattaaaagatttcctcggtacaaaaagttctaagtacaacaatgaaaaagacatgctttatttgggtggaacctctgggttgagtgtatatataactactggtaggataagcacaagacttatagtcaaccaggcatttcaaagttgcaacggacaaataatgtccaaagcattgaaagataattcttccacccaaaatttcatcaaagaagttgcatggagagatttttacagacattgtatgtgcaactggccatatacctccatgggaatgccttatagattggacactttagatataaaatgggagaataaccctgtagcatttgaaaagtggtgtactggtaatacaggcattcccatagtcgatgccataatgagaaaattattgtacacaggctatattaataacagatctagaatgatcacagcttcttttctttctaaaaacttattaatagattggagatggggggaacgctggtttatgaaacacttgatagacggtgattcttcttccaatgttggtggctggggtttttgttctagtacaggaattgatgcccaaccatattttagagtttttaatatggatatacaagcaaaaaaatatgacccacaaatgatattcgtcaaacaatgggttcccgaattgatttcttccgaaaataagcgtccagaaaactatccaaaacctttagttgatttaaagcatagtagggagcgtgctttgaaagtttataaagacgcaatgtga

SEQ ID NO: 10865 - DNA, 621 bp, Saccharomyces cerevisiae
atgagtttcctaaacatttttacttttttcagcgtccttgtgtctgttgcaacagccgtcagatttgatttgactaacgtcacttgtaataacctacatggacctcactgtggtacctacgttatggaagtcgttggccaaaatggtacatttttgggtcaatctacgtttgctggtgccgacgttttaactgaaagcgctggtgacgcttgggcaagatatttgggccaggaaacaagattcctcccaaagttgactactattgctagcaatgatacgaagaacttttctccactaatcttcaccaccaatatctacacttgtaaccctcaatccattggtgatgctatggttccttttgctaacactgttactggtgaaattgaatacaactcttgggcagacaccgctgataatgcttccttcataaccggtttagctaaccaattgtttaactctactcagtatggcgttcaagttgcttcctgttacccaaactttgcttctgttattttgagcaccccaactgtgaacattttcgctgcgaatgagacattaccagattattgtaccgccatccagttgaaggccgtttgtccaccagacgctggttttgcttga

SEQ ID NO: 10866 - DNA, 621 bp, Artificial Sequence
  Description of Artificial Sequence: Synthetic polynucleotide
atgagtttcttgaacatttttacttttttcagcgtccttgtgtctgttgcaacagccgtcagatttgatttgactaacgtcacttgtaataacttacatggacctcactgtggtacctacgttatggaagtcgttggccaaaatggtacatttttgggtcaatctacgtttgctggtgccgacgttttaactgaaagcgctggtgacgcttgggcaagatatttgggccaggaaacaagattcctcccaaagttgactactattgctagcaatgatacgaagaacttttctccattgatcttcaccaccaatatctacacttgtaaccctcaatccattggtgatgctatggttccttttgctaacactgttactggtgaaattgaatacaactcttgggcagacaccgctgataatgcttccttcataaccggtttagctaaccaattgtttaactctactcagtatggcgttcaagttgcttcctgttacccaaactttgcttctgttattttgagcaccccaactgtgaacattttcgctgcgaatgagacattaccagattattgtaccgccatccagttgaaggccgtttgtccaccagacgctggttttgcttga

SEQ ID NO: 10867 - DNA, 1131 bp, Saccharomyces cerevisiae
atgtcgaagggaaaggttttgctggttctttacgaaggtggtaagcatgctgaagagcaggaaaagttattggggtgtattgaaaatgaacttggtatcagaaatttcattgaagaacagggatacgagttggttactaccattgacaaggaccctgagccaacctcaacggtagacagggagttgaaagacgctgaaattgtcattactacgccctttttccccgcctacatctcgagaaacaggattgcagaagctcctaacctgaagctctgtgtaaccgctggcgtcggttcagaccatgtcgatttagaagctgcaaatgaacggaaaatcacggtcaccgaagttactggttctaacgtcgtttctgtcgcagagcacgttatggccacaattttggttttgataagaaactataatggtggtcatcaacaagcaattaatggtgagtgggatattgccggcgtggctaaaaatgagtatgatctggaagacaaaataatttcaacggtaggtgccggtagaattggatatagggttctggaaagattggtcgcatttaatccgaagaagttactgtactacgactaccaggaactacctgcggaagcaatcaatagattgaacgaggccagcaagcttttcaatggcagaggtgatattgttcagagagtagagaaattggaggatatggttgctcagtcagatgttgttaccatcaactgtccattgcacaaggactcaaggggtttattcaataaaaagcttatttcccacatgaaagatggtgcatacttggtgaataccgctagaggtgctatttgtgtcgcagaagatgttgccgaggcagtcaagtctggtaaattggctggctatggtggtgatgtctgggataagcaaccagcaccaaaagaccatccctggaggactatggacaataaggaccacgtgggaaacgcaatgactgttcatatcagtggcacatctctggatgctcaaaagaggtacgctcagggagtaaagaacatcctaaatagttacttttccaaaaagtttgattaccgtccacaggatattattgtgcagaatggttcttatgccaccagagcttatggacagaagaaataa

SEQ ID NO: 10868 - DNA, 1131 bp, Artificial Sequence
  Description of Artificial Sequence: Synthetic polynucleotide
atgtccaagggaaaggttttgttggttctttacgaaggtggtaagcatgctgaagagcaggaaaagttattggggtgtattgaaaatgaacttggtatcagaaatttcattgaagaacagggatacgagttggttactaccattgacaaggaccctgagccaacctctacggtagacagggagttgaaagacgctgaaattgtcattactacgccctttttccccgcctacatctccagaaacaggattgcagaagctcctaacttgaagctctgtgtaaccgctggcgtcggttctgaccatgtcgatttagaagctgcaaatgaaagaaaaatcacggtcaccgaagttactggttctaacgtcgtttctgtcgcagagcacgttatggccacaattttggttttgataagaaactataatggtggtcatcaacaagcaattaatggtgagtgggatattgccggcgtggctaaaaatgagtatgatttggaagacaaaataatttctacggtaggtgccggtagaattggatatagggttttggaaagattggtcgcatttaatccgaagaagttattgtactacgactaccaggaattacctgcggaagcaatcaatagattgaacgaggccagcaagcttttcaatggcagaggtgatattgttcagagagtagagaaattggaggatatggttgctcagagcgatgttgttaccatcaactgtccattgcacaaggacagcaggggtttattcaataaaaagcttatttcccacatgaaagatggtgcatacttggtgaataccgctagaggtgctatttgtgtcgcagaagatgttgccgaggcagtcaagtctggtaaattggctggctatggtggtgatgtctgggataagcaaccagcaccaaaagaccatccctggaggactatggacaataaggaccacgtgggaaacgcaatgactgttcatatcagtggcacatctttagatgctcaaaagaggtacgctcagggagtaaagaacatcttgaatagttacttttccaaaaagtttgattaccgtccacaggatattattgtgcagaatggttcttatgccaccagagcttatggacagaagaaatga

SEQ ID NO: 10869 - DNA, 1875 bp, Saccharomyces cerevisiae
atgagattccaccgtcaaggtaccgcagccaccgtaggcgtactgctcattgtgctgcttggtttctgttggaaattatctgaatcttatggcatagtgtcaactgccctaccacacaagcaacctgcaaccaaaatcacagacacaccttctatacgatgggataattaccatgagtttgtcagagacattgattttgataacagcacggctatctttaattccattcgagctgctttaagacagtctccatcggatatacatcctgtcggagtatcttattttcccgctgtaattcccaaaggaactttaatgtaccatgccggatcaaaagtgccaactaccttcgaatggctggctatggaccacgaattcagctactctttcggcttgaggtcaccatcctatgggagaaaatctttggaaagaaggcatgggaggttcggcaatggcacccatggtgatcatccaaaagggccaccaccaccaccaccaccagacgaaaaagatcgaggttcacaaaaaatgcttacctatagagcagcacgggacctcaacaaatttctctatcttgatggggcttctgctgcaaaaactgactcaggagagatggacacgcagctaatgttgtcaaatgttattaaagagaaattgaaccttacagatgatggtgaaaacgaacgaatggccgaacgactctacgctgctagaatatgcaaatgggggaagccattcgggcttgacggaattatcagggtagaggttggctttgaggtcgttttgtgtgatttttcggctgataacgtcgaacttgtttcaatgttagaaatggtccagcctaaccagtacctaggcttaccagcacctaccgttatatcgaaagaggaaggttggcctctggatgaaaatggaaacctagttgaagatcagctaacagatgaccaaaaggcgattctggaaagagaagatggttgggagaagactttttctaatttcaacgcagttaagagcttcaatcagttgagagcgggtacagcgcatgacaacggggagcatcgaatccatatcgactataggtacctagtgagcgggataaacaggacttacattgctcctgatcctaacaacagaagattactcgatgaaggaatgacatgggaaaagcaattggacatggtagatgacttagaaaaggctctggaagtcggatttgatgccacgcaaagtatggattggcagttagcatttgatgagcttgtccttaaatttgctccattactaaaatctgttagtaacatactgaacagcaatggtgatattaatgagtcaattgccatcaatgcaacagcactcacattgaacttttgtttaaggtttgagcctgcaagcaacaacagtgatgaattcggtagcgggaaagactttgctgtctaccaatatgtgagcccataccaggccttaaaaacggatgcagactttttgatttggtcatctgctgtcagcgtggtcggagaaattgttgatgccatttataaagtgaatgatttattgatacccgaagtctactcttttatgacagataacacaacttccagcgacttaataaagaatgtcgaaacggctcgctccactatcgatggtttaattgaatctctagggtggattgaactaaattaccgttgtgagagacaatgcaattgggatgaagtttgttacactccttcctggggcccatctccaatgggtatgactgaaccaggttcccacaatgagggatttggaacccactttgatgaatctcgacaaaggttggttattaacagtaaactacagtgtatcaatataaatgatttgatggttaatcgtaatcattag

SEQ ID NO: 10870 - DNA, 1875 bp, Artificial Sequence
  Description of Artificial Sequence: Synthetic polynucleotide
atgagattccaccgtcaaggtaccgcagccaccgtaggcgtattactcattgtgttgcttggtttctgttggaaattatctgaatcttatggcatagtgtccactgccttaccacacaagcaacctgcaaccaaaatcacagacacaccttctataagatgggataattaccatgagtttgtcagagacattgattttgataacagcacggctatctttaattccattagagctgctttaagacagtctccaagtgatatacatcctgtcggagtatcttattttcccgctgtaattcccaaaggaactttaatgtaccatgccggatctaaagtgccaactaccttcgaatggttggctatggaccacgaattcagctactctttcggcttgaggtctccatcctatgggagaaaatctttggaaagaaggcatgggaggttcggcaatggcacccatggtgatcatccaaaagggccaccaccaccaccaccaccagacgaaaaagatagaggttctcaaaaaatgcttacctatagagcagcaagagacctcaacaaatttctctatcttgatggggcttctgctgcaaaaactgactctggagagatggacacgcagttgatgttgagcaatgttattaaagagaaattgaaccttacagatgatggtgaaaacgaaagaatggccgaaaggctctacgctgctagaatatgcaaatgggggaagccattcgggcttgacggaattatcagggtagaggttggctttgaggtcgttttgtgtgatttttctgctgataacgtcgaacttgtttctatgttagaaatggtccagcctaaccagtacttgggcttaccagcacctaccgttatatccaaagaggaaggttggcctttggatgaaaatggaaacttggttgaagatcagttgacagatgaccaaaaggcgattttggaaagagaagatggttgggagaagactttttctaatttcaacgcagttaagagcttcaatcagttgagagcgggtacagcgcatgacaacggggagcatagaatccatatcgactataggtacttggtgagcgggataaacaggacttacattgctcctgatcctaacaacagaagattactcgatgaaggaatgacatgggaaaagcaattggacatggtagatgacttagaaaaggctttggaagtcggatttgatgccacgcaaagtatggattggcagttagcatttgatgagcttgtccttaaatttgctccattattgaaatctgttagtaacatattaaacagcaatggtgatattaatgagtctattgccatcaatgcaacagcactcacattgaacttttgtttaaggtttgagcctgcaagcaacaacagtgatgaattcggtagcgggaaagactttgctgtctaccaatatgtgagcccataccaggccttaaaaacggatgcagactttttgatttggtcttctgctgtcagcgtggtcggagaaattgttgatgccatttataaagtgaatgatttattgatacccgaagtctactcttttatgacagataacacaacttccagcgacttaataaagaatgtcgaaacggctcgctccactatcgatggtttaattgaatctttagggtggattgaattgaattaccgttgtgagagacaatgcaattgggatgaagtttgttacactccttcctggggcccatctccaatgggtatgactgaaccaggttcccacaatgagggatttggaacccactttgatgaatctagacaaaggttggttattaacagtaaattacagtgtatcaatataaatgatttgatggttaatcgtaatcattga

SEQ ID NO: 10871 - DNA, 1128 bp, Saccharomyces cerevisiae
atgattttcaatccggtcatatcaaatcacaagttgagccattatattcatgttttttgtacattcaccacgttctgcatattaggtactgaaacacgtcaggctataacggcgctttccacctacactccggccttcgttactgctccgaccgttctctggtctaattgttcatcctgcatgctaatggggattatgcaatctttaaatgcttacacttggatgaaagatcaccaagtcttgtttttaggtgtaactactgggtactgtggtgccctgtcttccttttctagtatgctgctagagatgttcgaacactctacaaacttaactaacggtaatatcgctaaccacacaaaactgccgaacagagcttacggtataatggagtttttatctgtcttgctcgttcatcttatggtttccatgggtagtcttattttcggtaggcaacttggtaaggaggttattgttgcttatggatctagttcgttttcgaagccatatacccctccctcagacactgtaaaggaaaatgctggtgatgttgatacacaagaaatggaaaaaaatattctagagtttaaattcaaaactccagcaccattttttaagaaattttttgatattgtggataaactcgcgtatgcactagcttttccattaattattttgtttgtggtgctgtgtgcgtattatgagaactattcgaggggcaagtggacactaccatgtctatttggaattttcgctggtttcctaagatattggttggcagaaatgtttaataaaacaaacaaaaagtttccattgggtactttcttggcaaacgttttcgccactttattgattggcatatttaccatggtgcaacgtggtaaaaaacacttttctacggacgttccaattgtgaactcgttgaattcatgtcatattgtttctgcgttaatatccggattttgcggcactttgagtaccattagcacgtttatcaatgaagggtataagctatcatttattaacatgcttatttattatactgtttcgattgcaatttcatattgcttattggtgataactctcggatcctatgcttggactagaggattgaccaacccgatttgttag

SEQ ID NO: 10872 - DNA, 1128 bp, Artificial Sequence
  Description of Artificial Sequence: Synthetic polynucleotide
atgattttcaatccggtcatatccaatcacaagttgagccattatattcatgttttttgtacattcaccacgttctgcatattaggtactgaaacacgtcaggctataacggcgctttccacctacactccggccttcgttactgctccgaccgttctctggtctaattgttcttcctgcatgttaatggggattatgcaatctttaaatgcttacacttggatgaaagatcaccaagtcttgtttttaggtgtaactactgggtactgtggtgccttatcttccttttctagtatgttattggagatgttcgaacactctacaaacttaactaacggtaatatcgctaaccacacaaaattaccgaacagagcttacggtataatggagtttttatctgtcttgctcgttcatcttatggtttccatgggtagtcttattttcggtaggcaacttggtaaggaggttattgttgcttatggatctagttctttttccaagccatatacccctccctctgacactgtaaaggaaaatgctggtgatgttgatacacaagaaatggaaaaaaatattttagagtttaaattcaaaactccagcaccattttttaagaaattttttgatattgtggataaactcgcgtatgcattggcttttccattaattattttgtttgtggtgttgtgtgcgtattatgagaactattctaggggcaagtggacattaccatgtttatttggaattttcgctggtttcttaagatattggttggcagaaatgtttaataaaacaaacaaaaagtttccattgggtactttcttggcaaacgttttcgccactttattgattggcatatttaccatggtgcaacgtggtaaaaaacacttttctacggacgttccaattgtgaactctttgaattcttgtcatattgtttctgcgttaatatccggattttgcggcactttgagtaccattagcacgtttatcaatgaagggtataagttatcttttattaacatgcttatttattatactgtttctattgcaatttcttattgcttattggtgataactctcggatcctatgcttggactagaggattgaccaacccgatttgttga

SEQ ID NO: 10873 - DNA, 714 bp, Saccharomyces cerevisiae
atgactccaaaaagagcgctaatatctcttacttcataccacggtcccttctacaaagatggtgcgaaaacaggcgtttttgtagttgagattttgcgatcgttcgatacattcgaaaagcatggtttcgaagtggacttcgtttctgagactggtggatttggctgggatgaacattacttgccaaagagctttattggtggcgaagataagatgaactttgaaacgaaaaattccgccttcaataaggcgttagcgaggatcaagaccgcaaatgaagtcaacgccagcgactataaagtattctttgcatctgctggacatggtgctctatttgactatcccaaagctaaaaatctgcaagatattgcatccaagatatatgccaatgggggtgtgatcgctgccatctgtcatggaccgctccttttcgatggattaatagatatcaaaacaacaagaccattaatcgaaggcaaagctataacaggtttcccactcgagggtgaaatcgccctgggagttgacgacatcttgaggagcagaaaattgacaacggttgaacgcgttgcaaacaagaatggagccaagtacttggcgccaatccatccctgggatgactactctattacagatggaaagctagttacgggtgttaacgcaaattcttcctattcgaccacaattagagctataaacgcattatatagctga

SEQ ID NO: 10874 - DNA, 714 bp, Artificial Sequence
  Description of Artificial Sequence: Synthetic polynucleotide
atgactccaaaaagagcgttaatatctcttacttcttaccacggtcccttctacaaagatggtgcgaaaacaggcgtttttgtagttgagattttgagatctttcgatacattcgaaaagcatggtttcgaagtggacttcgtttctgagactggtggatttggctgggatgaacattacttgccaaagagctttattggtggcgaagataagatgaactttgaaacgaaaaattccgccttcaataaggcgttagcgaggatcaagaccgcaaatgaagtcaacgccagcgactataaagtattctttgcatctgctggacatggtgctttgtttgactatcccaaagctaaaaatttacaagatattgcatccaagatatatgccaatgggggtgtgatcgctgccatctgtcatggaccgctccttttcgatggattaatagatatcaaaacaacaagaccattaatcgaaggcaaagctataacaggtttcccactcgagggtgaaatcgccttaggagttgacgacatcttgaggagcagaaaattgacaacggttgaacgcgttgcaaacaagaatggagccaagtacttggcgccaatccatccctgggatgactactctattacagatggaaagttggttacgggtgttaacgcaaattcttcctattctaccacaattagagctataaacgcattatatagctga

SEQ ID NO: 10875 - DNA, 1314 bp, Saccharomyces cerevisiae
atgtccatcacgaaggtacatgctagaacggtgtatgattctcgcggcaatccgactgttgaggttgaaattacaacagagaatggtctcttcagagcgatcgtcccatctggtgcctccaccggcattcacgaagctgttgaacttagagacgggaacaagtccgaatggatgggaaaaggggtgaccaaggcagtcagtaacgtcaatagtatcatagggcctgctttaatcaagtccgaattatgtgtaaccaatcagaagggcatagacgagctcatgatatcgttagacggaacttctaacaagtcaaggttgggcgccaatgctatccttggtgtttccttgtgcgttgctcgagctgctgccgcacaaaagggaattactctctacaagtatatagccgagttagcggatgctagacaggacccctttgttattcctgttccttttttcaatgttttgaatggtggagcccacgccggtggctctttagctatgcaagaattcaagatcgcgccagtcggggctcagagctttgcagaagccatgaggatgggttcggaagtttaccatcatttgaagatattggcgaaggagcaatatggaccttccgctggaaatgttggtgacgagggtggagttgcccccgatattgacactgccgaagacgccttggacatgattgtggaagccattaacatatgcggttacgagggtagagtgaaagtaggaatcgatagtgctccttctgttttttataaggacgggaaatacgacctaaatttcaaggaaccgaactctgacccatctcactggctcagtccagcccagttagcagaatattaccattcattgctaaagaaatacccaatcatttccctggaagatccctacgccgaagatgattggtcctcgtggtctgccttcctaaagactgtcaatgttcagattattgcagatgacctgacatgcaccaacaagaccaggatcgcccgtgctatagaggagaaatgtgcgaatactctgttgctgaaactcaaccagatcggtactctgactgagtctattgaagccgccaatcaggctttcgatgctggatggggtgtaatgatatcgcatagatcaggtgaaaccgaagatccgtttatcgctgatttggtcgttggtttaagatgtggtcaaattaaatcgggcgctttgtcgagatcagaaagactggccaagtataatgaacttttgcgtatcgaagaggaactgggggacgattgtatatatgctggtcataggtttcatgatggaaacaaactataa

SEQ ID NO: 10876 - DNA, 1314 bp, Artificial Sequence
  Description of Artificial Sequence: Synthetic polynucleotide
atgtccatcacgaaggtacatgctagaacggtgtatgattctcgcggcaatccgactgttgaggttgaaattacaacagagaatggtctcttcagagcgatcgtcccatctggtgcctccaccggcattcacgaagctgttgaacttagagacgggaacaagtccgaatggatgggaaaaggggtgaccaaggcagtcagtaacgtcaatagtatcatagggcctgctttaatcaagtccgaattatgtgtaaccaatcagaagggcatagacgagctcatgatatctttagacggaacttctaacaagtccaggttgggcgccaatgctatccttggtgtttccttgtgcgttgctagagctgctgccgcacaaaagggaattactctctacaagtatatagccgagttagcggatgctagacaggacccctttgttattcctgttccttttttcaatgttttgaatggtggagcccacgccggtggctctttagctatgcaagaattcaagatcgcgccagtcggggctcagagctttgcagaagccatgaggatgggttctgaagtttaccatcatttgaagatattggcgaaggagcaatatggaccttccgctggaaatgttggtgacgagggtggagttgcccccgatattgacactgccgaagacgccttggacatgattgtggaagccattaacatatgcggttacgagggtagagtgaaagtaggaatcgatagtgctccttctgttttttataaggacgggaaatacgacttgaatttcaaggaaccgaactctgacccatctcactggctcagtccagcccagttagcagaatattaccattctttgttgaagaaatacccaatcatttccttagaagatccctacgccgaagatgattggtcctcttggtctgccttcttgaagactgtcaatgttcagattattgcagatgacttgacatgcaccaacaagaccaggatcgcccgtgctatagaggagaaatgtgcgaatactttattgttgaaactcaaccagatcggtactttaactgagtctattgaagccgccaatcaggctttcgatgctggatggggtgtaatgatatctcatagatctggtgaaaccgaagatccgtttatcgctgatttggtcgttggtttaagatgtggtcaaattaaatctggcgctttgtccagaagtgaaagattggccaagtataatgaacttttgcgtatcgaagaggaattgggggacgattgtatatatgctggtcataggtttcatgatggaaacaaattgtga

SEQ ID NO: 10877 - DNA, 495 bp, Saccharomyces cerevisiae
atgaccaatgaaggaataggtataaatagagatacttcaactatatgccttcgagaatatgtctttattcatttctttcctgttaagcttatatcagcactaacaaacaaaacaaatacaatggtcaaattaacttcaatcgctgctggtgttgccgctatcgctgccggtgttgccgctgctccagccactaccactctatctccatctgacgaaagagtcaacttggtcgaattgggtgtttacgtctccgatatcagagctcatttggctcaatactacttgtttcaagcagctcatccaacagagacctacccagttgagattgctgaagctgttttcaactatggtgacttcaccaccatgttgactggtattccagctgaacaagtcaccagagtcatcactggtgtcccatggtactctaccagattgagaccggctatctccagtgctctatctaaggacggtatctacactgctattccaaaatag

SEQ ID NO: 10878 - DNA, 495 bp, Artificial Sequence
  Description of Artificial Sequence: Synthetic polynucleotide
atgaccaatgaaggaataggtataaatagagatacttctactatatgccttagagaatatgtctttattcatttctttcctgttaagcttatatctgcattaacaaacaaaacaaatacaatggtcaaattaacttctatcgctgctggtgttgccgctatcgctgccggtgttgccgctgctccagccactaccactttatctccatctgacgaaagagtcaacttggtcgaattgggtgtttacgtctccgatatcagagctcatttggctcaatactacttgtttcaagcagctcatccaacagagacctacccagttgagattgctgaagctgttttcaactatggtgacttcaccaccatgttgactggtattccagctgaacaagtcaccagagtcatcactggtgtcccatggtactctaccagattgagaccggctatctccagtgctttatctaaggacggtatctacactgctattccaaaatga

SEQ ID NO: 10879 - DNA, 168 bp, Saccharomyces cerevisiae
atgatcgtaaataatacacatatacttaccctaccaccacatgccgtatccaccctcacttgtatactgatatggcataggcacacggatgctacagtatatatcatctcaagttaccctactctcacattccactccatggcccatctctcacttcatcagtactaa

SEQ ID NO: 10880 - DNA, 168 bp, Artificial Sequence
  Description of Artificial Sequence: Synthetic polynucleotide
atgatcgtaaataatacacatatacttaccttgccaccacatgccgtatccaccctcacttgtatattaatatggcataggcacacggatgctacagtatatatcatctccagttaccctactctcacattccactccatggcccatctctcccttcatcagtactga

SEQ ID NO: 10881 - DNA, 5391 bp, Saccharomyces cerevisiae; identical to SEQ ID NO: 2833

SEQ ID NO: 10882 - DNA, 5391 bp, Artificial Sequence; identical to SEQ ID NO: 2834
  Description of Artificial Sequence: Synthetic polynucleotide

SEQ ID NO: 10883 - DNA, 5580 bp, Saccharomyces cerevisiae; identical to SEQ ID NO: 4713

SEQ ID NO: 10884 - DNA, 5580 bp, Artificial Sequence; identical to SEQ ID NO: 4714
  Description of Artificial Sequence: Synthetic polynucleotide

SEQ ID NO: 10885 - DNA, 495 bp, Saccharomyces cerevisiae; identical to SEQ ID NO: 10877

SEQ ID NO: 10886 - DNA, 495 bp, Artificial Sequence; identical to SEQ ID NO: 10878
  Description of Artificial Sequence: Synthetic polynucleotide

SEQ ID NO: 10887 - DNA, 1314 bp, Saccharomyces cerevisiae; identical to SEQ ID NO: 10875

SEQ ID NO: 10888 - DNA, 1314 bp, Artificial Sequence; identical to SEQ ID NO: 10876
  Description of Artificial Sequence: Synthetic polynucleotide

SEQ ID NO: 10889 - DNA, 714 bp, Saccharomyces cerevisiae
atgactccaaaaagagcgctaatatctcttacttcataccacggtcccttctataaagatggtgcgaaaacaggcgtttttgtagttgagattttgcggtcgttcgatactttcgaaaagcatggtttcgaagtggacttcgtttctgagactggtggatttggctgggatgaacattacttgccaaagagctttattggtggcgaagataagatgaactttgaaacgaaaaattccgccttcaataaggcgttagcgaggatcaagaccgcaaatgaagtcaacgccagcgactataaaatattctttgcatctgctggacatggtgctctatttgactatcccaaagctaaaaatctgcaagatattgcatccaagatatatgccaatgggggtgtgatcgctgccatctgtcatggaccgctccttttcgatggattaatagatatcaaaacaacaagaccattaatcgaaggcaaagctataacaggtttcccactcgagggtgaaatcgccctgggagttgacgacatcttgaggagcagaaaattgacaacggttgaacgcgttgcaaacaagaatggagccaagtacttggcgccaatccatccctgggatgactactctattacagatggaaagctagttacgggtgttaacgcaaattcttcctattcgaccacaattagagctataaacgcattatatagctga

SEQ ID NO: 10890 - DNA, 714 bp, Artificial Sequence
  Description of Artificial Sequence: Synthetic polynucleotide
atgactccaaaaagagcgttaatatctcttacttcttaccacggtcccttctataaagatggtgcgaaaacaggcgtttttgtagttgagattttgagatctttcgatactttcgaaaagcatggtttcgaagtggacttcgtttctgagactggtggatttggctgggatgaacattacttgccaaagagctttattggtggcgaagataagatgaactttgaaacgaaaaattccgccttcaataaggcgttagcgaggatcaagaccgcaaatgaagtcaacgccagcgactataaaatattctttgcatctgctggacatggtgctttgtttgactatcccaaagctaaaaatttacaagatattgcatccaagatatatgccaatgggggtgtgatcgctgccatctgtcatggaccgctccttttcgatggattaatagatatcaaaacaacaagaccattaatcgaaggcaaagctataacaggtttcccactcgagggtgaaatcgccttaggagttgacgacatcttgaggagcagaaaattgacaacggttgaacgcgttgcaaacaagaatggagccaagtacttggcgccaatccatccctgggatgactactctattacagatggaaagttggttacgggtgttaacgcaaattcttcctattctaccacaattagagctataaacgcattatatagctga

SEQ ID NO: 10891 - DNA, 1128 bp, Saccharomyces cerevisiae
atgattttcaatccggtcatatcaaatcacaagttgagccattatattcatgttttttgtacattcaccacgttctgcatattaggtactgaaacacgtcaggctataacggcgctttccacctacactccggccttcgttactgctccgaccgttctctggtctaattgttcatcctgcatgctaatggggattatgcaatctttaaatgcttacacttggatgaaagatcaccaagtcttgtttttaggtgtaactactgggtactgtggtgccctgtcttccttttctagtatgctgctagagatgttcgaacactctacaaacttaactaacggtaatatcgctaaccacacaaaactgccgaacagagcttacggtataatggagtttttatctgtcttgctcgttcatcttatggtttccatgggtagtcttattttcggtaggcaacttggtaaggaggttattgttgcttatggatctagttcgttttcgaagccatatacccctccctcagacactgtaaaggaaaatgctggtgatgttgatacacaagaaatggaaaaaaatattctagagtttaaattcaaaactccagcaccattttttaagaaattttttgatgttgtggataaactcgcgtacgcactagcttttccattaattattttgtttgtggtgctgtgtgcgtattatgagaactattcgaggggcaagtggacactaccatgtctatttggaattttcgctggtttcctaagatattggttggcagaaatgtttaataaaacaaacaaaaagtttccattgggtactttcttggcaaacgttttcgccactttattgattggcatatttaccatggtgcaacgtggtaaaaaacacttttccacggatattccaattgtgaactcgttgaattcatgccatattgtttctgcgttaatatccggattttgcggcactttgagtaccattagcacgtttatcaatgaagggtataagctatcatttattaacatgcttatttattatactgtttcgattggaatttcatattgcttattggtgataactctcggatcctatgcttggactagaggattgactaacccgatttgttag

SEQ ID NO: 10892 - DNA, 1128 bp, Artificial Sequence
  Description of Artificial Sequence: Synthetic polynucleotide
atgattttcaatccggtcatatccaatcacaagttgagccattatattcatgttttttgtacattcaccacgttctgcatattaggtactgaaacacgtcaggctataacggcgctttccacctacactccggccttcgttactgctccgaccgttctctggtctaattgttcttcctgcatgttaatggggattatgcaatctttaaatgcttacacttggatgaaagatcaccaagtcttgtttttaggtgtaactactgggtactgtggtgccttatcttccttttctagtatgttattggagatgttcgaacactctacaaacttaactaacggtaatatcgctaaccacacaaaattaccgaacagagcttacggtataatggagtttttatctgtcttgctcgttcatcttatggtttccatgggtagtcttattttcggtaggcaacttggtaaggaggttattgttgcttatggatctagttctttttccaagccatatacccctccctctgacactgtaaaggaaaatgctggtgatgttgatacacaagaaatggaaaaaaatattttagagtttaaattcaaaactccagcaccattttttaagaaattttttgatgttgtggataaactcgcgtacgcattggcttttccattaattattttgtttgtggtgttgtgtgcgtattatgagaactattctaggggcaagtggacattaccatgtttatttggaattttcgctggtttcttaagatattggttggcagaaatgtttaataaaacaaacaaaaagtttccattgggtactttcttggcaaacgttttcgccactttattgattggcatatttaccatggtgcaacgtggtaaaaaacacttttccacggatattccaattgtgaactctttgaattcttgccatattgtttctgcgttaatatccggattttgcggcactttgagtaccattagcacgtttatcaatgaagggtataagttatcttttattaacatgcttatttattatactgtttctattggaatttcttattgcttattggtgataactctcggatcctatgcttggactagaggattgactaacccgatttgttga

SEQ ID NO: 10893 - DNA, 303 bp, Saccharomyces cerevisiae
atgacagataacacaacttccagcgacttaataaagaatgtcgaaacggctcgctccactatcgatggtttaattgaatctctagggtggattgaactaaattaccgttgtgagaggcaatgcaattgggatgaagtttgttacactccttcctggggcccatctccaatgggtatgactgaaccaggttcccacaatgagggatttggaacccactttgatgaatctcgacaaaggttggttattaacagtaaactacagtgtatcaatataaatgatttgatggttaatcgtaatcattag

SEQ ID NO: 10894 - DNA, 303 bp, Artificial Sequence
  Description of Artificial Sequence: Synthetic polynucleotide
atgacagataacacaacttccagcgacttaataaagaatgtcgaaacggctcgctccactatcgatggtttaattgaatctttagggtggattgaattgaattaccgttgtgagaggcaatgcaattgggatgaagtttgttacactccttcctggggcccatctccaatgggtatgactgaaccaggttcccacaatgagggatttggaacccactttgatgaatctagacaaaggttggttattaacagtaaattacagtgtatcaatataaatgatttgatggttaatcgtaatcattga

SEQ ID NO: 10895 - DNA, 1464 bp, Saccharomyces cerevisiae
atgcgattccatcgtcaaggtatctcagccatcataggcgtactactcattgtactgcttggtttctgttggaagttatctggatcttacggcatagtatcaactgccctaccacacaatcaatctgcaattaaaagcacagacttaccttctatacgatgggataattaccatgagttcgtcagagacattgattttgataacagtacggctatctttaattccattcgggctgctttaagacagtctccatcggatatacatcctgtcggagtatcttattttcccgctgtaattcccaaaggaactttaatgtaccatgccggatcaaaagtgccaactaccttcgaatggctagctatggaccatgaattcagctactctttcggcttgaggtcaccatcctatgggagaaaatctttggaaagaaggcatgggaggttcggcaatggcaccaacggtgatcatccaaaagggccaccaccaccaccaccaccaccagacgaaaaaggtcggggttcacaaaaaatgcttacttatagagcagcacgggacctcaacaaatttctctatcttgatggggcttctgctgcgaaaactgactcaggagagatggacacgcagctaatgttgtcaaatgttattaaagagaaattgaaccttacagatgatggtgaaaacgaacgaatggccgaacgactctacgctgctagaatatgcaaatgggggaagccattcgggcttgacggaattatcagggtagaggttggctttgaggtcgttttgtgtgatttttcggctgataacgtcgaacttgtttcaatgttagaaatggtccagcctaaccagtacctaggcttaccagcacctaccgtaatatcgaaggaagaaggttggcctctggatgaaaatggaagcctagttgaagatcagctaacagatgaccaaaaggcgattctggaaagagaagatggttgggagaaggctttttctaatttcaacgcagttaaaagcttcaatcagttgagagcgggtgcagcgcatgacaacggggagcatcgaatccatatcgactataggtacctagtgagcgggataaacaggacgtacattgctcctgatcctaacaacagaagattactcgatgaaggaatgacatgggaaaagcaattggacatggtagatgacttagaaaaggcgctggaagtcggatttgatgccacgcaaagtatggattggcagttagcatttgatgagcttgtccttaaatttgctccattactaaaatctgttagtaacatactgaacagcgatggtgatattaatgagtcaattgccatcaatgcaacagcactcacattgaacttttgtctaccaatatgtgagcccataccaggccttaaaaacggatgcagactttttgatttggtcatctgctgtcagcgttgtcggagaaattgttga

SEQ ID NO: 10896 - DNA, 1464 bp, Artificial Sequence
  Description of Artificial Sequence: Synthetic polynucleotide
atgagattccatcgtcaaggtatcagtgccatcataggcgtattactcattgtattgcttggtttctgttggaagttatctggatcttacggcatagtatccactgccttaccacacaatcaatctgcaattaaaagcacagacttaccttctataagatgggataattaccatgagttcgtcagagacattgattttgataacagtacggctatctttaattccattagagctgctttaagacagtctccaagtgatatacatcctgtcggagtatcttattttcccgctgtaattcccaaaggaactttaatgtaccatgccggatctaaagtgccaactaccttcgaatggttggctatggaccatgaattcagctactctttcggcttgaggtctccatcctatgggagaaaatctttggaaagaaggcatgggaggttcggcaatggcaccaacggtgatcatccaaaagggccaccaccaccaccaccaccaccagacgaaaaaggtagaggttctcaaaaaatgcttacttatagagcagcaagagacctcaacaaatttctctatcttgatggggcttctgctgcgaaaactgactctggagagatggacacgcagttgatgttgagcaatgttattaaagagaaattgaaccttacagatgatggtgaaaacgaaagaatggccgaaaggctctacgctgctagaatatgcaaatgggggaagccattcgggcttgacggaattatcagggtagaggttggctttgaggtcgttttgtgtgatttttctgctgataacgtcgaacttgtttctatgttagaaatggtccagcctaaccagtacttgggcttaccagcacctaccgtaatatccaaggaagaaggttggcctttggatgaaaatggaagcttagttgaagatcagttgacagatgaccaaaaggcgattttggaaagagaagatggttgggagaaggctttttctaatttcaacgcagttaaaagcttcaatcagttgagagcgggtgcagcgcatgacaacggggagcatagaatccatatcgactataggtacttggtgagcgggataaacaggacgtacattgctcctgatcctaacaacagaagattactcgatgaaggaatgacatgggaaaagcaattggacatggtagatgacttagaaaaggcgttagaagtcggatttgatgccacgcaaagtatggattggcagttagcatttgatgagcttgtccttaaatttgctccattattgaaatctgttagtaacatattaaacagcgatggtgatattaatgagtctattgccatcaatgcaacagcactcacattgaacttttgtttgccaatatgtgagcccataccaggccttaaaaacggatgcagactttttgatttggtcatctgctgtcagcgttgtagaagaaattgttga

SEQ ID NO: 10897 - DNA, 1764 bp, Saccharomyces cerevisiae
atggatatactcaagaggggaaatgaatcggacaagtttacgaaaatagagacagaatctactacgataccaaatgactcggatagatctggttcactgatcagaagaatgaaggattccttcaagcaaagtaacctgcatgtcattccagaagaccttgaaaacagcgaacagacagagcaggaaaaaatccaatggaaactagcttctcagccctatcaaaaagtcttgagccaaaggcacttgaccatgattgccataggtggtactttggggacgggactgttcattggtttaggttattctttggcatctgggccagccgctttgctaatcggttttttgttagttggtacttcaatgttctgtgtcgttcagagtgccgcagagctttcctgccaattcccggtttctggctcatatgccacacatgtcagtaggttcatagatgaatcggttggctttactgtggctacaaactatgctttggcttggctgatttcttttccaagcgaattaattggttgtgcacttactatttcatactggaaccaaacggttaatccggctgtttgggtggccattttttatgttttcattatggtactgaacttgtttggtgtgagaggctttgccgagactgagtttgctctgtcaatcattaaggttattgctatatttattttcatcattattggtatcgtccttattgccggaggggggcctaactctactggttatattggcgccaaatactggcacgacccaggtgccttcgcaaaacctgtcttcaagaatttgtgtaacacattcgtttctgctgctttttcctttggtggtagtgagttagtgctgttaactagtacagaatctaaaaatatttcagctatatcacgtgctgccaaaggtacgttctggagaatcgcgattttttacattactaccgttgtcattattggatgtctcgtaccttataacgaccccagactgctcagtggttcgaacagtgaggatgtatctgcctctccctttgttattgctttgagtaatacaggatcaatgggtgcaaaagtttccaactttatgaatgtcgttatccttgttgcggttgtgtcagtttgcaattcttgcgtttatgcttcttcaagactaattcaagctttaggtgcatctggccaacttccttcggtatgttcctacatggacagaaagggtaggcctttggttggcattgggattagtggtgcatttggtcttttaggttttcttgtggcctcgaaaaaggaggacgaggtcttcacttggcttttcgccctttgttccatttcatcattcttcacctggttctgtatttgtatgtcacaaattagatttaggatggctttgaaagctcaaggaagatccaatgacgaaatagcttacaaatccatactgggtgtttatggtggaattttggggtgtgtgctaaatgcattgctaattgcgggtgaaatatacgtatcggccgccccggtcggtagccctagctccgctgaagccttctttgaatactgtttaagtattccaatcatgattgttgtttattttgcacataggttttatcgaagagattggaaacacttctacatcaagaggagtgagatcgatctggatactgggtgttccgtggagaatctagagcttttcaaagcacaaaaagaagctgaggaacaactcattgcttctaagccattctattacaaaatctacagattttggtgttag

SEQ ID NO: 10898 - DNA, 1764 bp, Artificial Sequence
  Description of Artificial Sequence: Synthetic polynucleotide
atggatatactcaagaggggaaatgaaagtgacaagtttacgaaaatagagacagaatctactacgataccaaatgacagtgatagatctggttctttgatcagaagaatgaaggattccttcaagcaaagtaacttacatgtcattccagaagaccttgaaaacagcgaacagacagagcaggaaaaaatccaatggaaattggcttctcagccctatcaaaaagtcttgagccaaaggcacttgaccatgattgccataggtggtactttggggacgggattattcattggtttaggttattctttggcatctgggccagccgctttgttgatcggttttttgttagttggtacttctatgttctgtgtcgttcagagtgccgcagagctttcctgccaattcccggtttctggctcctatgccacacatgtcagtaggttcatagatgaatctgttggctttactgtggctacaaactatgctttggcttggttgatttcttttccaagcgaattaattggttgtgcacttactatttcttactggaaccaaacggttaatccggctgtttgggtggccattttttatgttttcattatggtattgaacttgtttggtgtgagaggctttgccgagactgagtttgctttatctatcattaaggttattgctatatttattttcatcattattggtatcgtccttattgccggaggggggcctaactctactggttatattggcgccaaatactggcacgacccaggtgccttcgcaaaacctgtcttcaagaatttgtgtaacacattcgtttctgctgctttttcctttggtggtagtgagttagtgttattaactagtacagaatctaaaaatatttctgctatatctcgtgctgccaaaggtacgttctggagaatcgcgattttttacattactaccgttgtcattattggatgtctcgtaccttataacgaccccagattactcagtggttccaacagtgaggatgtatctgcctctccctttgttattgctttgagtaatacaggatccatgggtgcaaaagtttccaactttatgaatgtcgttatccttgttgcggttgtgtctgtttgcaattcttgcgtttatgcttcttctagattgattcaagctttaggtgcatctggccaacttccttctgtatgttcctacatggacagaaagggtaggcctttggttggcattgggattagtggtgcatttggtcttttaggttttcttgtggcctccaaaaaggaggacgaggtcttcacttggcttttcgccctttgttccatttcttctttcttcacctggttctgtatttgtatgtctcaaattagatttaggatggctttgaaagctcaaggaagatccaatgacgaaatagcttacaaatccatattaggtgtttatggtggaattttggggtgtgtgttgaatgcattgttaattgcgggtgaaatatacgtatctgccgccccggtcggtagccctagctccgctgaagccttctttgaatactgtttaagtattccaatcatgattgttgtttattttgcacataggttttatagaagagattggaaacacttctacatcaagaggagtgagatcgatttggatactgggtgttccgtggagaatttggagcttttcaaagcacaaaaagaagctgaggaacaactcattgcttctaagccattctattacaaaatctacagattttggtgttga

SEQ ID NO: 10899 - DNA, 978 bp, Saccharomyces cerevisiae
atggcacgtcttcctctaaagcagttcttagcggataaccccaaaaaagttcttgttcttgacggtggtcaaggaacagaactggaaaacagaggtatcaaagttgcaaatcccgtgtggtctactattccatttattagcgaatcattttggtctgatgagtcatctgctaacagaaaaattgtcaaagaaatgttcaacgatttcttgaatgctggcgcagaaatattgatgactacaacataccaaacgagttataaatcagtttctgaaaacaccccaatcagaactttatccgagtacaataaccttttaaacaggattgtcgatttttctcgtaattgtattggcgaagacaaatatttgattggctgtattggcccatggggtgctcatatttgtcgtgagtttacaggcgactatggtgctgagccagaaaatattgatttctaccaatacttcaagcctcagttggagaatttcaataaaaatgacaaattggatttgattgggtttgaaaccattcctaacatccatgaactgaaagctatcttatcttgggatgagagtatcctgtctagacccttctatatcgggttgtctgtgcatgagcacggtgtcttgagagacggcactaccatggaagaaatcgcacaagttattaaggacttgggcgacaaaataaatcctaacttctcgttcttaggaatcaactgcgtcagcttcaaccaatcacccgacattcttgagtctctacatcaagcactaccaaatatggccttgcttgcttatccaaacagtggtgaagtttatgatactgaaaagaagatatggttgccaaatagcgataagctgaacagttgggatacggttgttaaacagtacattagcagcggtgcccgtatcattggtggttgttgcagaacaagtccaaaagacatccaagagatttctgcagccgtcaagaaatacacgtaa

SEQ ID NO: 10900 - DNA, 978 bp, Artificial Sequence
  Description of Artificial Sequence: Synthetic polynucleotide
atggcacgtcttcctttgaagcagttcttagcggataaccccaaaaaagttcttgttcttgacggtggtcaaggaacagaattggaaaacagaggtatcaaagttgcaaatcccgtgtggtctactattccatttattagcgaaagtttttggtctgatgagtcttctgctaacagaaaaattgtcaaagaaatgttcaacgatttcttgaatgctggcgcagaaatattgatgactacaacataccaaacgagttataaatctgtttctgaaaacaccccaatcagaactttatccgagtacaataaccttttaaacaggattgtcgatttttctcgtaattgtattggcgaagacaaatatttgattggctgtattggcccatggggtgctcatatttgtcgtgagtttacaggcgactatggtgctgagccagaaaatattgatttctaccaatacttcaagcctcagttggagaatttcaataaaaatgacaaattggatttgattgggtttgaaaccattcctaacatccatgaattgaaagctatcttatcttgggatgagagtatcctttctagacccttctatatcgggttgtctgtgcatgagcacggtgtcttgagagacggcactaccatggaagaaatcgcacaagttattaaggacttgggcgacaaaataaatcctaacttcagtttcttaggaatcaactgcgtcagcttcaaccaatctcccgacattcttgagtctttgcatcaagcattgccaaatatggccttgcttgcttatccaaacagtggtgaagtttatgatactgaaaagaagatatggttgccaaatagcgataagttgaacagttgggatacggttgttaaacagtacattagcagcggtgcccgtatcattggtggttgttgcagaacaagtccaaaagacatccaagagatttctgcagccgtcaagaaatacacgtga

SEQ ID NO: 10901 - DNA, 1554 bp, Saccharomyces cerevisiae
atgactacgtttaggccactatcaagttttgaaaaaaaaattctcactcaatctttgaatgaccaaagaaatggaactattttttcgagtacatattcaaaatctttaagtagagaaaatgacgctgactggcattctgatgaagtcacgctcggaacaaattcttccaaagatgattctcgtctgactctgcccctaatagcaacaactttgaagagattgattaaatcgcaaccggcattgtttgcaactgtaaacgaagaatgggaattcgagccattgaagcagctgaaaacttccgatattgttaatgtgattgagtttgaaaccataaaagataaggaggtcaattgccattggggtgttccacctccttatctcttgcgtcatgccttcaacaagactagatttgttcccggatcaaataaacctttatggacactatatgtaattgacgaagcgctattggtttttcatggtcacgacgtattgtttgatatattttcagcagctaactttcacaaattatttttaaaagagttaaacgaaatcagcacagtaacacactctgaagataggattttgtttgatgtcaatgacatcaatctctcagaattaaaatttcccaaatcgatatatgatagcgcaaaattacacctgcccgctatgacaccacaaatcttccacaagcaaactcagtcatttttcaaatcaatatactataacactttaaaaagacctttcggctatttaaccaatcaaacttccctcagctcgtcagtatctgcaacacagctgaaaaagtataatgatattctaaatgcgcacacctcattatgcgggacaacagtatttgggatagtaaacaaccaaaggtttaactatttaaagtcaatcgttaatcaagagcatatatgtctaagaagtttcatctgtggtattgcaatgatatgtttaaaacctctcgttaaggatttcagcggtacaatagtatttactattcccataaatttaagaaaccacttaggcttaggtgggtcattgggtctcttcttcaaagaactaagggtcgaatgtccactttctctaattgatgacgaactttccgccaacgaatttttgaccaacagtaacgataacgaggataatgatgatgagtttaatgaaagattgatggaatatcaatttaataaagttacaaagcacgttagcggttttattatggcaaaactgaggagttgggaaaagaatgggtttaatgatgacgatataaggaggatgaagtatgacaatgacgacgatttccatatccaaaattcaaggacaaaattgattcaaatcaatgatgtttccgacatatcgttatcgatgaacggcgatgacaaatctttcaaaattgtaagtacgggatttacaagttcgataaatcgccccacattaatgtctctttcctatacatactgtgaagagatgggcctgaatatctgtattcactaccctgattcgtataatttagaatcttttgtagaatgcttcgaatcctttattgaatag

SEQ ID NO: 10902 - DNA, 1554 bp, Artificial Sequence
  Description of Artificial Sequence: Synthetic polynucleotide
atgactacgtttaggccattatccagttttgaaaaaaaaattctcactcaatctttgaatgaccaaagaaatggaactattttttctagtacatattctaaatctttaagtagagaaaatgacgctgactggcattctgatgaagtcacgctcggaacaaattcttccaaagatgattctcgtttgactttacccttgatagcaacaactttgaagagattgattaaatctcaaccggcattgtttgcaactgtaaacgaagaatgggaattcgagccattgaagcagttgaaaacttccgatattgttaatgtgattgagtttgaaaccataaaagataaggaggtcaattgccattggggtgttccacctccttatctcttgcgtcatgccttcaacaagactagatttgttcccggaagtaataaacctttatggacattatatgtaattgacgaagcgttattggtttttcatggtcacgacgtattgtttgatatattttctgcagctaactttcacaaattatttttaaaagagttaaacgaaatcagcacagtaacacactctgaagataggattttgtttgatgtcaatgacatcaatctctctgaattaaaatttcccaaatctatatatgatagcgcaaaattacacttacccgctatgacaccacaaatcttccacaagcaaactcagtcttttttcaaatctatatactataacactttaaaaagacctttcggctatttaaccaatcaaacttccctcagctcttctgtatctgcaacacagttgaaaaagtataatgatattttgaatgcgcacaccagtttatgcgggacaacagtatttgggatagtaaacaaccaaaggtttaactatttaaagtctatcgttaatcaagagcatatatgtttgagaagtttcatctgtggtattgcaatgatatgtttaaaacctctcgttaaggatttcagcggtacaatagtatttactattcccataaatttaagaaaccacttaggcttaggtgggtctttgggtctcttcttcaaagaattgagggtcgaatgtccactttctttgattgatgacgaactttccgccaacgaatttttgaccaacagtaacgataacgaggataatgatgatgagtttaatgaaagattgatggaatatcaatttaataaagttacaaagcacgttagcggttttattatggcaaaattgaggagttgggaaaagaatgggtttaatgatgacgatataaggaggatgaagtatgacaatgacgacgatttccatatccaaaattctaggacaaaattgattcaaatcaatgatgtttccgacatatctttatctatgaacggcgatgacaaatctttcaaaattgtaagtacgggatttacaagtagtataaatcgccccacattaatgtctctttcctatacatactgtgaagagatgggcttgaatatctgtattcactaccctgattcttataatttagaatcttttgtagaatgcttcgaatcctttattgaatga

SEQ ID NO: 10903 - DNA, 189 bp, Saccharomyces cerevisiae
atgtctgcctggaggaaagctggtatatcatatgctgcatatttgaatgtggccgctcaggctatccgttcttcattgaaaactgaattacaaaccgctagtgttcttaacagatcgcaaacagatgctttttatacccaatataaaaatggcactgcagcttctgaacccactccaataacaaaatag

SEQ ID NO: 10904 - DNA, 189 bp, Artificial Sequence
  Description of Artificial Sequence: Synthetic polynucleotide
atgtctgcctggaggaaagctggtatatcttatgctgcatatttgaatgtggccgctcaggctatccgttcttctttgaaaactgaattacaaaccgctagtgttcttaacagatctcaaacagatgctttttatacccaatataaaaatggcactgcagcttctgaacccactccaataacaaaatga

SEQ ID NO: 10905 - DNA, 2322 bp, Saccharomyces cerevisiae
atgttgaatggtcgtttaccacttttgcggctgggcatatgcagaaacatgctgtcccgtccccgactggctaaactgccatctataaggtttcggtctttggtcaccccttcttcatcgcagctcattcctctcagtcggttgtgtttaaggtcacctgcagttggaaaatcactaattttacaaagttttagatgtaattcatccaaaacagttccagaaacttctctgccttcagcctctcccatatctaaaggatcagcaaggtcggcacatgcaaaggagcaatctaaaactgatgactataaagatataataaggttatttatgttggcgaaacgggattggaaactgcttcttacagccatacttcttttaaccatatcatgttccataggcatgtctattcctaaagtcataggtattgtccttgacacacttaagacgtcatctggatcagatttttttgatttgaagataccgattttttctttgcctttatatgagtttctttccttttttactgttgctttactgattggttgtgctgctaattttggtagatttatattattgaggatactaagtgagcgtgttgttgcacgcctaagggcaaatgtcattaaaaaaacgcttcatcaagacgcagaattcttcgacaaccataaagttggggatttaatttctcgtttaggatctgatgcttatgttgtttcaagatcaatgacccagaaggtctcggatggggtcaaagccctaatttgtggggttgttggcgtggggatgatgtgttctttgtcacctcaactatcaatattgttactattcttcactccacctgttctttttagtgcctcagtgttcgggaagcaaattagaaacacctctaaagaccttcaagaagctactggtcaattgactagagtcgctgaagaacaactctctggtatcaagacggttcagtcgtttgttgctgaaggtaatgaattgtctaggtataacgttgcaattagagatatttttcaggtgggaaaaactgcggcatttacaaacgcaaagttttttactacaactagtctcttaggtgacctaagttttttaaccgtccttgcgtatggctcctatcttgttttacaatcacagctctccattggtgatctgactgcatttatgctgtacacagaatatacggggaatgcggtattcggcctttctaccttctattcggaaattatgcagggtgctggggccgcttccaggttgtttgaattaacagataggaaaccttccatttcaccgactgtgggacacaagtataaaccagatcgtggtgttatcgaatttaaagatgtttcatttagctaccctacaaggccttctgttcaaatattcaagaatttaaattttaaaattgcgccaggatcgagtgtttgtattgtgggcccttcaggtcgtggtaaatctacaattgcactcttactgctaagatattataatcccactactgggactattacgatagataaccaagatatctctaaattgaattgtaaatccctaagaaggcatattggtatcgttcagcaagagccggtactgatgtcaggtactattagggataatatcacttatgggttgacatataccccaacaaaggaagaaatcaggtcagtagcaaagcagtgcttttgccataactttatcacaaaatttccgaacacatacgatacggtaattggtcctcacggcaccttactaagtggaggacaaaagcagcgtattgcgattgcaagggctctaatcaaaaagccaactattttgattcttgatgaagctacatcagctttagatgttgaaagtgaaggagccattaactatacgtttggtcaactaatgaaatcaaaatcgatgactattgttagcatcgcgcacaggctaagtacgatcagaagatcagagaatgttattgtccttggccatgatggatcagtggtagaaatgggcaaattcaaagaattgtatgcgaatccaacaagtgctttatcgcaattacttaatgagaaagcggctcctgggccatctgaccaacaactgcaaatagagaaggtcatcgaaaaggaagatttgaatgagagtaaggagcatgatgaccagaaaaaggacgataatgacgataatgataataatcatgataacgacagcaataaccagtctccagagacgaaagacaataattcagatgatattgaaaaatctgtcgaacatctcctgaaagacgcggcaaaggaggctaatccaattaagatcacaccacaaccgtga

SEQ ID NO: 10906 - DNA, 2322 bp, Artificial Sequence
  Description of Artificial Sequence: Synthetic polynucleotide
atgttgaatggtcgtttaccacttttgagattgggcatatgcagaaacatgctttcccgtcccaggttggctaaattaccatctataaggtttagatctttggtcaccccttcttcttctcagctcattcctctcagtagattgtgtttaaggtctcctgcagttggaaaatctttgattttacaaagttttagatgtaattcttccaaaacagttccagaaacttctttgccttctgcctctcccatatctaaaggaagtgcaaggtctgcacatgcaaaggagcaatctaaaactgatgactataaagatataataaggttatttatgttggcgaaaagagattggaaattacttcttacagccatacttcttttaaccatatcttgttccataggcatgtctattcctaaagtcataggtattgtccttgacacacttaagacgtcttctggaagtgatttttttgatttgaagataccgattttttctttgcctttatatgagtttctttccttttttactgttgctttattgattggttgtgctgctaattttggtagatttatattattgaggatattgagtgagcgtgttgttgcacgcttaagggcaaatgtcattaaaaaaacgcttcatcaagacgcagaattcttcgacaaccataaagttggggatttaatttctcgtttaggatctgatgcttatgttgtttctagaagtatgacccagaaggtctctgatggggtcaaagccttaatttgtggggttgttggcgtggggatgatgtgttctttgtctcctcaattatctatattgttattattcttcactccacctgttctttttagtgcctctgtgttcgggaagcaaattagaaacacctctaaagaccttcaagaagctactggtcaattgactagagtcgctgaagaacaactctctggtatcaagacggttcagtcttttgttgctgaaggtaatgaattgtctaggtataacgttgcaattagagatatttttcaggtgggaaaaactgcggcatttacaaacgcaaagttttttactacaactagtctcttaggtgacttgagttttttaaccgtccttgcgtatggctcctatcttgttttacaatctcagctctccattggtgatttgactgcatttatgctttacacagaatatacggggaatgcggtattcggcctttctaccttctattctgaaattatgcagggtgctggggccgcttccaggttgtttgaattaacagataggaaaccttccatttctccgactgtgggacacaagtataaaccagatcgtggtgttatcgaatttaaagatgtttcttttagctaccctacaaggccttctgttcaaatattcaagaatttaaattttaaaattgcgccaggaagtagtgtttgtattgtgggcccttctggtcgtggtaaatctacaattgcactcttattattaagatattataatcccactactgggactattacgatagataaccaagatatctctaaattgaattgtaaatccttgagaaggcatattggtatcgttcagcaagagccggtattaatgagtggtactattagggataatatcacttatgggttgacatataccccaacaaaggaagaaatcaggtctgtagcaaagcagtgcttttgccataactttatcacaaaatttccgaacacatacgatacggtaattggtcctcacggcaccttattaagtggaggacaaaagcagcgtattgcgattgcaagggctttgatcaaaaagccaactattttgattcttgatgaagctacatctgctttagatgttgaaagtgaaggagccattaactatacgtttggtcaattgatgaaatctaaatctatgactattgttagcatcgcgcacaggttgagtacgatcagaagaagtgagaatgttattgtccttggccatgatggatctgtggtagaaatgggcaaattcaaagaattgtatgcgaatccaacaagtgctttatctcaattacttaatgagaaagcggctcctgggccatctgaccaacaattacaaatagagaaggtcatcgaaaaggaagatttgaatgagagtaaggagcatgatgaccagaaaaaggacgataatgacgataatgataataatcatgataacgacagcaataaccagtctccagagacgaaagacaataattctgatgatattgaaaaatctgtcgaacatctcttgaaagacgcggcaaaggaggctaatccaattaagatcacaccacaaccgtga

SEQ ID NO: 10907 - DNA, 1935 bp, Saccharomyces cerevisiae
atggataatgatggacccagatctatgaccattggggatgacttccaagagaacttttgtgaacgtttagaaagaattcacaatacattacattcaataaacgattgcaactcattgaatgagagtaccacaagtatatcagagacattgttagttcaattttatgatgatttggagaacgttgcctcggtaattcccgacttagtcaacaagaaaagactgggaaaagacgatattttgttgtttatggactggttattattgaaaaaatatatgctatatcaatttattagtgacgttcataatattgaggaaggttttgctcatttgttggatttactagaggatgaattctcgaaggacgatcaggatagcgacaaatacaatcgatttagcccgatgtttgacgtcatagaagaatctacacaaattaagactcagttggagccatggcttactaacttgaaggaattattggatacgtcattggaatttaacgaaatttcaaaggatcatatggatacattacataaaatcattaatagcaatatatcgtattgtctggaaattcaggaagaaaggttcgcgtccccgatacggcatactccatcatttaccctagaacaactagtcaagttattaggaacgcatacggagacaactgagccaaaggtaccaaaattttctccggcagaagatattttatcaagaaagttcttgaacctaaaaaaaaatatccctccaattgaaaaaagtttgactgatatcctacctcaaagaattgtgcaatttgggcaccggaatataacaaacataactactttgcaaacaatcttgcaaaaaaaatacgagctgataatgaaagattatagatttatgaattcagagtttagggaattgaaagtcgaactaatcgacaaacgttggaatatactctttattaatttaaatcatgaactattatacattcttgatgagatagaaaggttgcagtcgaaattactgacaacaaagtataccaaagatatcactataaggctcgagaggcaattggagagaaaatcaaaaactgtttctaagacattcaatattatttacagagcattggaattctcacttttggacgctggcgtcgcatcgaagacaaatgaattagctcaaagatggctgaatatcaagcctacagcggataaaattctaatcaaatcctccgcttcaaacaaaatagctactagcaagaagaagattccaaaaccgaaatcattaggctttgggcgaccgaatagtgttattggaactataacccaggatttccaggagagagtcgccattaatgaaggtgacagtaataaaacaccggaaaattcaactacagtggctttgaaaggtaaaaagcttggtaaagcgttactgcagaagatgaatattaaacctgcaacaagcccaaattcatcaaatgcgattaatccattttttgatccggagtcgccaaacaaaggaaaactgatactaagtagtgttcctcccttaccttatgacgaaaccgatgaaaccaccctccgtgtttctcgtggggaaaatgaaaagtcaccagactccttcattacatctcggcatgaaaataaagtacagattacagaaactcctttgatggcaaagaataagtctgtgcttgacatcgaaaaagataaatggaatcattaccggtccttgccctctaggatccctatatacaaggataaagtggtgaaagtcaccgtagaaaacacaccgatagcaaaggttttccagactccgccaacaaaaatcacgacacctaatagtcaagtttgggtcccttcgacaagaagaagaacccgattgaggcctcccacccccttatcacagttactttcaccaagagaagggcgtttagataaaaccccaacttattga

SEQ ID NO: 10908 - DNA, 1935 bp, Artificial Sequence
  Description of Artificial Sequence: Synthetic polynucleotide
atggataatgatggacccagatctatgaccattggggatgacttccaagagaacttttgtgaacgtttagaaagaattcacaatacattacattccataaacgattgcaactctttgaatgagagtaccacaagtatatctgagacattgttagttcaattttatgatgatttggagaacgttgcctctgtaattcccgacttagtcaacaagaaaagattaggaaaagacgatattttgttgtttatggactggttattattgaaaaaatatatgctttatcaatttattagtgacgttcataatattgaggaaggttttgctcatttgttggatttattggaggatgaattctccaaggacgatcaggatagcgacaaatacaatagatttagcccgatgtttgacgtcatagaagaatctacacaaattaagactcagttggagccatggcttactaacttgaaggaattattggatacgtctttggaatttaacgaaatttccaaggatcatatggatacattacataaaatcattaatagcaatatatcttattgtttagaaattcaggaagaaaggttcgcgtccccgataagacatactccatcttttaccttagaacaattggtcaagttattaggaacgcatacggagacaactgagccaaaggtaccaaaattttctccggcagaagatattttatctagaaagttcttgaacttgaaaaaaaatatccctccaattgaaaaaagtttgactgatatcttacctcaaagaattgtgcaatttgggcacagaaatataacaaacataactactttgcaaacaatcttgcaaaaaaaatacgagttgataatgaaagattatagatttatgaattctgagtttagggaattgaaagtcgaattgatcgacaaacgttggaatatactctttattaatttaaatcatgaattattatacattcttgatgagatagaaaggttgcagtccaaattattaacaacaaagtataccaaagatatcactataaggctcgagaggcaattggagagaaaatctaaaactgtttctaagacattcaatattatttacagagcattggaattctctcttttggacgctggcgtcgcatccaagacaaatgaattagctcaaagatggttaaatatcaagcctacagcggataaaattttgatcaaatcctccgcttctaacaaaatagctactagcaagaagaagattccaaaaccgaaatctttaggctttgggcgtccgaatagtgttattggaactataacccaggatttccaggagagagtcgccattaatgaaggtgacagtaataaaacaccggaaaattctactacagtggctttgaaaggtaaaaagcttggtaaagcgttattgcagaagatgaatattaaacctgcaacaagcccaaattcttccaatgcgattaatccattttttgatccggagtctccaaacaaaggaaaattgatattgagtagtgttcctcccttaccttatgacgaaaccgatgaaaccaccctccgtgtttctcgtggggaaaatgaaaagtctccagactccttcattacatctagacatgaaaataaagtacagattacagaaactcctttgatggcaaagaataagtctgtgcttgacatcgaaaaagataaatggaatcattaccgttccttgccctctaggatccctatatacaaggataaagtggtgaaagtcaccgtagaaaacacaccgatagcaaaggttttccagactccgccaacaaaaatcacgacacctaatagtcaagtttgggtcccttctacaagaagaagaaccagattgaggcctcccacccccttatctcagttactttctccaagagaagggcgtttagataaaaccccaacttattga

SEQ ID NO: 10909 - DNA, 2610 bp, Saccharomyces cerevisiae
atgactgaaagtgctatagatgaccaaaggtttaatcttacaaaggagttacaacgacactcatgcagagatcaagggaaaataacacaaaaggatgatgctttagattttataagttacagttcttttcaatcctcttttaatactgaccaaaaaagcgcgaacaatggaagtactgtgagaagaagcataaggtcgatttttagaagagcagccgaattgcctagagtccatatggggcctcttacttattcacatgggataaatgagcttgttaacaagaaattaagaaaagactgtgatctcagcacgctatgtcgcgtattgcaaagaggaatcaggatgattaggatgacaagaagaagaaggaagttctatgaatttaaattaatcaataacaacgggcaaataatatggaaagatggttcgaagtatctggaattagactccgttaaagacatcagaatcggtgatacggcgagtacttatcaagaggaagtagatccgaaaagattgagatcggacagtaaactttggattgctattatttataaggtttccaacaaattgaaagcgttacacgtagttgctttgaatgaattggactttaacacattcttaagctgcatttgcggtttagtgaagttaaggagggaattaatggaaagcatacttttgcctgataattcgcaattcgctaggatacattggcaaattactgtttctgaaaaagaggaagatgagaaaaaggacacattgagctttgcagatgtgaagaaactatgtgataaatttcatatttatgtgtcaactggtcaattgttagagtttttccaattagcagacatcaatcataacggactattaaattattttgaatttgaaaagttcattaaaatcttaaagaataggaaagaggtaaatatgatttggtctaaatttacaaaacctccacactcccacttatcatttgaaaatttttttcaatttttaattacagagcagcatgagcaagtggatcgtcaaactgcatggtcatattttattaagtacagagaaccgactcagctgacgatggggcaagatggttttaccaagttcttgaaggagcaaccatatttggtggaggttaaagaggagttatattcaaagccattaaaccattattttattgcatcttcacataatacttatttattggggaaacaaattgcagaaactccatctgtggagggatatattcaagtcctacaacaaggttgtaggtgcgtagaaattgatatatgggatggtgaaaatgggccagtggtatgccatggatttttaacgtcagctattcccttaaaaacagttatacgcgtgataaagaagtacgcttttataacgtctccgtatcctttgattatttcactggaaataaactgtaacaaggataatcaaaaattggcaagcctgataatgagagaggttttagcagaacagctgtactttgttggcacaagaactgataaactgccatcaccaagggaattaaaacataaaatactgttgaaatccaagaagacgagtgaagcaactagaggtcttagcgttaatgagccatttccatcttcttttagttcttcttacgaatcagctaatgaacaggaattaagaatgaaagatgactccacgaacagtagtagcgcaacaaattcttctagtatgcaacgcatcaaaagaattggattaaaaaagcacgctgatataattaatgatgtttctaacatttctggaatacatggcatcaagttcaggaatttctctttaccagagtccaaaacgatagcgcattgtttttcactgaatgagcgcaaagtagaatacatgataaaagacaaacacttaaaattatcgttggataaacataatagaagatatttgatgagagtctatcctcacgttttacgatacaaatcatcaaattttaacccaatacctttttggaaggccggtgtacaaatggtggctacgaattggcaaactaatgatattggacagcaacttaatctggcaatgtttcaaatattagatcaccaacctgatggaagttttaaatcaggatacgtgctaaaaccaaaaaagttgctacctgtagtaacaaaggcgaaaatgattccattaatttacgaacattttgaaaatggtagtgatcctgttactgttaaaattcgaattttatctacacagttattgcccagattgaatgatacatcgccaagcagaaataacaccaattcctttgttaaagtggagtttcataccgatgacgagccgacaatgcccatctcaatcgataagggtacaaggatttctgccactgaagcatccactaagagttctcaagggaatggattcaacccaatatgggatgctgaagtttctatcacattgaaagatacagacctcacatttataaaattcatggttatctctgaagagacccagattgcatctgtttgccttaagctgaactatttgaggatgggatatcgtcacattccgttgtttaacatggagggggaacaatacatattttgcactttatttattcatacacaaattttatag

SEQ ID NO: 10910 - DNA, 2610 bp, Artificial Sequence
  Description of Artificial Sequence: Synthetic polynucleotide
atgactgaaagtgctatagatgaccaaaggtttaatcttacaaaggagttacaaagacactcttgcagagatcaagggaaaataacacaaaaggatgatgctttagattttataagttacagttcttttcaatcctcttttaatactgaccaaaaaagcgcgaacaatggaagtactgtgagaagaagcataaggtctatttttagaagagcagccgaattgcctagagtccatatggggcctcttacttattctcatgggataaatgagcttgttaacaagaaattaagaaaagactgtgatctcagcacgttgtgtcgcgtattgcaaagaggaatcaggatgattaggatgacaagaagaagaaggaagttctatgaatttaaattaatcaataacaacgggcaaataatatggaaagatggttccaagtatttggaattagactccgttaaagacatcagaatcggtgatacggcgagtacttatcaagaggaagtagatccgaaaagattgagaagtgacagtaaactttggattgctattatttataaggtttccaacaaattgaaagcgttacacgtagttgctttgaatgaattggactttaacacattcttaagctgcatttgcggtttagtgaagttaaggagggaattaatggaaagcatacttttgcctgataattctcaattcgctaggatacattggcaaattactgtttctgaaaaagaggaagatgagaaaaaggacacattgagctttgcagatgtgaagaaattatgtgataaatttcatatttatgtgtccactggtcaattgttagagtttttccaattagcagacatcaatcataacggattattaaattattttgaatttgaaaagttcattaaaatcttaaagaataggaaagaggtaaatatgatttggtctaaatttacaaaacctccacactcccacttatcttttgaaaatttttttcaatttttaattacagagcagcatgagcaagtggatcgtcaaactgcatggagttattttattaagtacagagaaccgactcagttaacgatggggcaagatggttttaccaagttcttgaaggagcaaccatatttggtggaggttaaagaggagttatattccaagccattaaaccattattttattgcatcttctcataatacttatttattggggaaacaaattgcagaaactccatctgtggagggatatattcaagtcttacaacaaggttgtaggtgcgtagaaattgatatatgggatggtgaaaatgggccagtggtatgccatggatttttaacgagcgctattcccttaaaaacagttatacgcgtgataaagaagtacgcttttataacgtctccgtatcctttgattatttctttggaaataaactgtaacaaggataatcaaaaattggcaagcttgataatgagagaggttttagcagaacagttatactttgttggcacaagaactgataaattaccatctccaagggaattaaaacataaaatattattgaaatccaagaagacgagtgaagcaactagaggtcttagcgttaatgagccatttccatcttcttttagttcttcttacgaatctgctaatgaacaggaattaagaatgaaagatgactccacgaacagtagtagcgcaacaaattcttctagtatgcaacgcatcaaaagaattggattaaaaaagcacgctgatataattaatgatgtttctaacatttctggaatacatggcatcaagttcaggaatttctctttaccagagtccaaaacgatagcgcattgtttttctttgaatgagcgcaaagtagaatacatgataaaagacaaacacttaaaattatctttggataaacataatagaagatatttgatgagagtctatcctcacgttttaagatacaaatcttccaattttaacccaatacctttttggaaggccggtgtacaaatggtggctacgaattggcaaactaatgatattggacagcaacttaatttggcaatgtttcaaatattagatcaccaacctgatggaagttttaaaagtggatacgtgttgaaaccaaaaaagttgttacctgtagtaacaaaggcgaaaatgattccattaatttacgaacattttgaaaatggtagtgatcctgttactgttaaaattagaattttatctacacagttattgcccagattgaatgatacatctccaagcagaaataacaccaattcctttgttaaagtggagtttcataccgatgacgagccgacaatgcccatctccatcgataagggtacaaggatttctgccactgaagcatccactaagagttctcaagggaatggattcaacccaatatgggatgctgaagtttctatcacattgaaagatacagacctcacatttataaaattcatggttatctctgaagagacccagattgcatctgtttgccttaagttgaactatttgaggatgggatatcgtcacattccgttgtttaacatggagggggaacaatacatattttgcactttatttattcatacacaaattttatga

SEQ ID NO: 10911 - DNA, 630 bp, Saccharomyces cerevisiae
atgatatcaccatcaaaaaagagaaccattttatcaagcaagaatataaaccaaaaaccacgagcagtggtaaaaggcaatgaacttcgttcaccatcaaagagaaggtcacaaatagacacagactatgcactaaggcgaagtccaataaagacaatccaaatttctaaagctgcacaatttatgctgtatgaggaaacggctgaagaaagaaacatagctgtccacagacataatgaaatatacaataataacaattctgtgagcaatgagaataatccttcccaagtaaaagaaaacctttcacccgctaaaatttgcccttatgaaagagcatttttaagggaaggaggaagaattgcattgaaggacttaagtgttgacgaattcaaaggttacatacaggatcctctcaccgatgagactataccactgacgttgccactgggtgataaaaaaatcagcctacccagttttataacgccgccaagaaattcgaagatatctattttcttcactagtaaacaccaaggacagaacccagagacaaagatatcccgttctaccgatgacgtcagtgaaaaaaaagtagtgagaaaactgtccttccacgtctatgaagatgagtaa

SEQ ID NO: 10912 - DNA, 630 bp, Artificial Sequence
  Description of Artificial Sequence: Synthetic polynucleotide
atgatatctccatctaaaaagagaaccattttatccagcaagaatataaaccaaaaaccaagagcagtggtaaaaggcaatgaacttcgttctccatctaagagaaggtctcaaatagacacagactatgcattaaggagaagtccaataaagacaatccaaatttctaaagctgcacaatttatgctttatgaggaaacggctgaagaaagaaacatagctgtccacagacataatgaaatatacaataataacaattctgtgagcaatgagaataatccttcccaagtaaaagaaaacctttctcccgctaaaatttgcccttatgaaagagcatttttaagggaaggaggaagaattgcattgaaggacttaagtgttgacgaattcaaaggttacatacaggatcctctcaccgatgagactataccattaacgttgccattgggtgataaaaaaatcagcttgcccagttttataacgccgccaagaaattctaagatatctattttcttcactagtaaacaccaaggacagaacccagagacaaagatatcccgttctaccgatgacgtcagtgaaaaaaaagtagtgagaaaactttccttccacgtctatgaagatgagtga

SEQ ID NO: 10913 - DNA, 957 bp, Saccharomyces cerevisiae
atgggaaaggctgcgaaaaagaagtactccggagcaacttcgtccaaacaagtctctgccgagaaacatttgagttcagtatttaaattcaacacagatctaggtcagcatattttgaaaaatcctttggtggcgcaaggtattgttgataaggcacagattagaccctcagatgttgttttggaggttggtcctggtacaggtaacctaactgtaaggatcctcgaacaagcaaaaaacgtagtggcagtagaaatggatcccagaatggctgcagaattaactaagagggtacgtggcacacctgtggagaaaaagttagaaatcatgcttggagattttatgaagactgaattaccatactttgatatctgtattagtaacactccttaccagatctcatcgcctctggttttcaaattaattaaccaaccaagaccaccaagagtatctattcttatgtttcaaagagagtttgctttaagattactggcaagaccaggtgactcattatactgtagattatccgccaatgtacaaatgtgggctaatgttacacacatcatgaaagtgggtaagaataacttcagaccgccaccacaagtggaatccagcgttgttagactagagattaaaaatccaagaccgcaagtggattacaacgaatgggatggtttgttgagaatcgtctttgtgaggaaaaacagaacgatttcagctggcttcaaatcgaccaccgtgatggacattctggagaagaattataagacatttttggcgatgaacaacgaaatggtggatgatacaaagggttctatgcacgatgtcgtcaaggaaaagattgacacagttctgaaggagaccgacttaggcgacaaaagagcgggtaaatgtgatcaaaatgatttcctaaggctattatatgcttttcaccaggttggtatccatttttcatga

SEQ ID NO: 10914 - DNA, 957 bp, Artificial Sequence
  Description of Artificial Sequence: Synthetic polynucleotide
atgggaaaggctgcgaaaaagaagtactccggagcaacttcttccaaacaagtctctgccgagaaacatttgagttctgtatttaaattcaacacagatttaggtcagcatattttgaaaaatcctttggtggcgcaaggtattgttgataaggcacagattagaccctctgatgttgttttggaggttggtcctggtacaggtaacttgactgtaaggatcctcgaacaagcaaaaaacgtagtggcagtagaaatggatcccagaatggctgcagaattaactaagagggtacgtggcacacctgtggagaaaaagttagaaatcatgcttggagattttatgaagactgaattaccatactttgatatctgtattagtaacactccttaccagatctcttctcctttggttttcaaattaattaaccaaccaagaccaccaagagtatctattcttatgtttcaaagagagtttgctttaagattattggcaagaccaggtgactctttatactgtagattatccgccaatgtacaaatgtgggctaatgttacacacatcatgaaagtgggtaagaataacttcagaccgccaccacaagtggaatccagcgttgttagattggagattaaaaatccaagaccgcaagtggattacaacgaatgggatggtttgttgagaatcgtctttgtgaggaaaaacagaacgatttctgctggcttcaaatctaccaccgtgatggacattttagagaagaattataagacatttttggcgatgaacaacgaaatggtggatgatacaaagggttctatgcacgatgtcgtcaaggaaaagattgacacagttttgaaggagaccgacttaggcgacaaaagagcgggtaaatgtgatcaaaatgatttcttgaggttattatatgcttttcaccaggttggtatccattttagttga

SEQ ID NO: 10915 - DNA, 1827 bp, Saccharomyces cerevisiae
atgaagatgcctctaaagaagatgtttaccagcacgtctcctcgtaactcttcttctcttgacagtgatcatgacgcttactattcgaaacaaaatcctgacaatttccctgtaaaggagcaagaaatctataacattgacctggaagaaaacaatgtgtcctctcgttcatccacctctacatcaccttcagcaagggacgactctttcgcagttccagatggtaaagacgaaaacacgcggttgaggaaagatttaaaggcaagacatatttctatgatcgccattggtggttcattaggtacaggtctgcttataggtacaggtaccgccttattgacgggtggtccggttgcgatgttaattgcatatgcctttgtcggccttttagtcttttacaccatggcctgtcttggtgaaatggcttcttacattccattggatggttttacaagttatgcctcacgttacgtggatcctgcattaggttttgctattggttatacttaccttttcaaatatttcatcttacctcccaaccaacttactgctgctgctttggtcattcaatattggatcagcagagaccgtgttaaccctggtgtgtggattactatattcttggttgttattgtcgctatcaatgtcgtcggtgtaaaattctttggtgaatttgaattttggttgtccagtttcaaagtcatggtaatgttgggtctaatcctgttactatttattattatgcttggtggaggtcctaaccatgaccgcctagggtttagatactggcgtgatcctggtgcgttcaaagaatattcgacggctatcactggtggtaaaggtaaatttgtttcgttcgttgctgttttcgtttacagtcttttcagttacacgggtattgaattgacaggtatcgtttgttctgaagctgagaatccaagaaaaagtgttccaaaggcaattaaattgacagtttaccgtatcattgttttttacctatgcaccgttttccttttgggtatgtgcgttgcatacaatgaccctcgtttactttccacaaaaggtaagagtatgtctgctgcggcatctccattcgtggttgccattcaaaactcaggtattgaagtcttacctcatatcttcaatgcttgtgtcttggttttcgttttcagtgcttgtaactcagatttgtacgtttcttccagaaatttatatgcgttggcaattgatggtaaagcgccaaagatcttcgctaagacaagtagatggggtgttccttacaatgctttaatactctccgtgctgttttgtggcttggcgtacatgaatgtgtcttcaggatcagcaaagattttcaactactttgttaacgttgtttctatgttcggaatcttgagttggatcaccattttaattgtttacatctacttcgataaagcctgccgtgctcaagggattgacaaatcaaaatttgcttatgtcgctcctggccaacgttatggtgcttattttgctttattcttctgcattttgattgctttaatcaaaaacttcactgttttcctaggtcataaatttgattataaaacattcatcaccgggtatattggcctgcctgtctatatcatttcttgggctggttacaaattgatatacaaaaccaaagtgataaagtctaccgacgtggatttgtacacatttaaggaaatatacgatagagaagaagaagagggaagaatgaaggaccaagaaaaggaagagcgtttaaaaagtaacggtaaaaatatggagtggttctatgaaaaatttttgggtaatatcttctag

SEQ ID NO: 10916 - DNA, 1827 bp, Artificial Sequence
  Description of Artificial Sequence: Synthetic polynucleotide
atgaagatgcctttgaagaagatgtttaccagcacgtctcctcgtaactcttcttctcttgacagtgatcatgacgcttactattctaaacaaaatcctgacaatttccctgtaaaggagcaagaaatctataacattgacttggaagaaaacaatgtgtcctctcgttcttccacctctacatctccttctgcaagggacgactctttcgcagttccagatggtaaagacgaaaacacgagattgaggaaagatttaaaggcaagacatatttctatgatcgccattggtggttctttaggtacaggtttacttataggtacaggtaccgccttattgacgggtggtccggttgcgatgttaattgcatatgcctttgtcggccttttagtcttttacaccatggcctgtcttggtgaaatggcttcttacattccattggatggttttacaagttatgcctctcgttacgtggatcctgcattaggttttgctattggttatacttaccttttcaaatatttcatcttacctcccaaccaacttactgctgctgctttggtcattcaatattggatcagcagagaccgtgttaaccctggtgtgtggattactatattcttggttgttattgtcgctatcaatgtcgtcggtgtaaaattctttggtgaatttgaattttggttgtccagtttcaaagtcatggtaatgttgggtttgatcttattactttttattattatgcttggtggaggtcctaaccatgaccgcttggggtttagatactggcgtgatcctggtgcgttcaaagaatattctacggctatcactggtggtaaaggtaaatttgtttctttcgttgctgttttcgtttacagtcttttcagttacacgggtattgaattgacaggtatcgtttgttctgaagctgagaatccaagaaaaagtgttccaaaggcaattaaattgacagtttaccgtatcattgttttttacttgtgcaccgttttccttttgggtatgtgcgttgcatacaatgaccctcgtttactttccacaaaaggtaagagtatgtctgctgcggcatctccattcgtggttgccattcaaaacagtggtattgaagtcttacctcatatcttcaatgcttgtgtcttggttttcgttttcagtgcttgtaacagtgatttgtacgtttcttccagaaatttatatgcgttggcaattgatggtaaagcgccaaagatcttcgctaagacaagtagatggggtgttccttacaatgctttaatactctccgtgcttttttgtggcttggcgtacatgaatgtgtcttctggaagtgcaaagattttcaactactttgttaacgttgtttctatgttcggaatcttgagttggatcaccattttaattgtttacatctacttcgataaagcctgccgtgctcaagggattgacaaatctaaatttgcttatgtcgctcctggccaacgttatggtgcttattttgctttattcttctgcattttgattgctttaatcaaaaacttcactgttttcttgggtcataaatttgattataaaacattcatcaccgggtatattggcttacctgtctatatcatttcttgggctggttacaaattgatatacaaaaccaaagtgataaagtctaccgacgtggatttgtacacatttaaggaaatatacgatagagaagaagaagagggaagaatgaaggaccaagaaaaggaagagcgtttaaaaagtaacggtaaaaatatggagtggttctatgaaaaatttttgggtaatatcttctga

SEQ ID NO: 10917 - DNA, 1062 bp, Saccharomyces cerevisiae
atgacgctgcaaagaattagtaaagattatctaaagcctaattatggacttatcttacttatagtgtcttattttttcaattcttctatggtagtttctaccaaagtcctagaaaatgacccactggaaacttcgcaatcaagaattaatcctctgcaaatcctgctagtaaggatgtctatcacgtactgttgtacgctagtatacatgcattggaataaacaaagtgttccagatattccatggggcccagcaccatgcaggaaatggttgatactccgaggtataatgggtttttttggtgtttttggaatgtacttttctttaatgtatctaagtataagtgacgctgtcttaatcaccttcatgtcgccaaccctaaccattttcctttcatttttactgctgggtgagccatttagtaaacttgaagccttggggtccctaatttcattttctggagtggtgttaattattagacctacatttttgtttggtgagcagacccaaggccagcaatctccacaagacgatattgttgagactcaaaatcccaaattaagactcattgctatcggggtgagtttattgggggtttgcggattgagtagtgtttacattatcataagatatatcggtaacaaggcacatgccatcatgagtgtcagttatttctcgttggttactactgttgtggcagccctcggtgtgcttctaattccctcgatgtctttacaactgcctcattcgtggaagcagtgggggctatttctgaacttgggtatttctggattcattcaccaaattctgttaacaatgggaatccagagggagcgtgcaggaaggggttcgttaatgacttatactcaagttatatatgctgttttctgggatgtcgtgctctttcaccactggccaaacatatggacgtggtgcggtatggcagttatcgttagttctactatatgggtcattaatatgagagcctccaaacaaaacgttgtggctactgccgagctactctccacatcggactttgaattagatgatttggaggattaa

SEQ ID NO: 10918 - DNA, 1062 bp, Artificial Sequence
  Description of Artificial Sequence: Synthetic polynucleotide
atgacgttacaaagaattagtaaagattatttgaagcctaattatggacttatcttacttatagtgtcttattttttcaattcttctatggtagtttctaccaaagtcttggaaaatgacccattggaaacttctcaatctagaattaatcctttacaaatcttattggtaaggatgtctatcacgtactgttgtacgttggtatacatgcattggaataaacaaagtgttccagatattccatggggcccagcaccatgcaggaaatggttgatactccgtggtataatgggtttttttggtgtttttggaatgtacttttctttaatgtatttgagtataagtgacgctgtcttaatcaccttcatgtctccaaccttaaccattttcctttcttttttattattgggtgagccatttagtaaacttgaagccttggggtccttgatttccttttctggagtggtgttaattattagacctacatttttgtttggtgagcagacccaaggccagcaatctccacaagacgatattgttgagactcaaaatcccaaattaagactcattgctatcggggtgagtttattgggggtttgcggattgagtagtgtttacattatcataagatatatcggtaacaaggcacatgccatcatgagtgtcagttatttcagtttggttactactgttgtggcagccctcggtgtgcttttgattccctctatgtctttacaattacctcattcttggaagcagtgggggttgtttttgaacttgggtatttctggattcattcaccaaattttattaacaatgggaatccagagggagcgtgcaggaaggggttctttaatgacttatactcaagttatatatgctgttttctgggatgtcgtgctctttcaccactggccaaacatatggacgtggtgcggtatggcagttatcgttagttctactatatgggtcattaatatgagagcctccaaacaaaacgttgtggctactgccgagttactctccacaagtgactttgaattagatgatttggaggattga

SEQ ID NO: 10919 - DNA, 1956 bp, Saccharomyces cerevisiae
atggcaaagaagaataagaaggataaagaggccaaaaaggcacgtgctgaactgaagaatcagaaaaaccaaaaaaagcaggagaaaaagtttcagaagaacaagaataagtctttaaacggcgaagaagatgatgaaagtgatcaagatctcgatgaaattctctctagctttagcaaaaagcaaattgaattagagcatgtagacatcacttctgtggaaaaaccctcttgtcgtactcatccgttgatgtttgcaaatccgcaacacaataaacatgaattgttcattttcggtggtgaatttacagatccagaaaccaaactaacacatttctataatgatttgtattcatactccataaagaacaactcttggaaaaaatacgtttcgcaaaatgcacctttgcccagatccagtgccgctgtcgctgtgcatccttccggaatagcactgttacacggtggtgaattttcgtccccaaaacaatctaaattctaccactattctgatacatggctgtttgactgcgttgaaaggaaattcactaagttggagtttggcggtagagactcttcacccagcgccagatcaggtcatagaattattgcttggaaaaactatttcatattatttggtggatttagagatttggggaatggtcaaacttcttacctaaatgatttgtggtgttttgatatctcaacctacaaatggaccaaattggagacaaacagcaaacctgacgctagatcgggtcattgtttcattcctacagataattctgccatattaatgggtggttactgtaaaatcattgccaaaaataataaaaatttaatgaagggaaaaatcttgaatgatgcatggaaactgaacttaacgcctgatccaaagaagtggcagtgggaaaaattaaagaatttcaagaaccagccctcaccaagagtcgggtattcgttcaatctatggaagcaaaacaagtccgttgcttttggtggtgtctacgatttacaagagacagaggaatccttagagtccgttttctataacgacctatatatgttccacctagagttgaacaaatggtctaaacttagaattaaacctcagcgtcaaacgaatagtaaaaattcacccgccacaagtaaaagaaaatctaataaagatcaagaaaaggaactgcaggatttactaaattccattctggccaagtctaatctaaatgacgacgacgatgacaatgatgacaacagcacaacgggtcctaactctatcgatgacgacgaagataacgaagatgacagtgatttggacaaccaagaagatattaccatctcaaatcaattacctcacccaagatttaacgcagcaacttgtgtagtgggcgactcgttgttcatttacagtggtgtctgggaactgggcgaaaaagattatcctataaactcattttatagtatagatttgaacaagttggatggtgtcaaggtttactgggaagacctatctgccatcgaagaagcaaagagactaggtgatagagattcggacgaagatgagtttgaatacgaggacgatgaggaggatgaggacgacggcgaagaggaacaagatgcaggaccccttgaaggtgatgaagatgaggaaagcgagagcgacgatgacaaacaagcgcagatggagattccagacgaaaggtcttggctaccacacccaaaaccgttcgaaactttaagagcattctacttaagggaaggtgcaaatttcttaacctggtctatttctaacaacagaaaccttaagggtaaacagttaaagacgaagtcatttgagttatgtgaagaccgttggtgggaaagaagagatcaggtgacccttgaggaagagcgtctggaggatacaggcggaatcattgaaagagatacgactactaaaccttccaaaagaaggtaa

SEQ ID NO: 10920 - DNA, 1956 bp, Artificial Sequence
  Description of Artificial Sequence: Synthetic polynucleotide
atggcaaagaagaataagaaggataaagaggccaaaaaggcacgtgctgaattgaagaatcagaaaaaccaaaaaaagcaggagaaaaagtttcagaagaacaagaataagtctttaaacggcgaagaagatgatgaaagtgatcaagatctcgatgaaattctctctagctttagcaaaaagcaaattgaattagagcatgtagacatcacttctgtggaaaaaccctcttgtcgtactcatccgttgatgtttgcaaatccgcaacacaataaacatgaattgttcattttcggtggtgaatttacagatccagaaaccaaattaacacatttctataatgatttgtattcttactccataaagaacaactcttggaaaaaatacgtttctcaaaatgcacctttgcccagatccagtgccgctgtcgctgtgcatccttccggaatagcattattacacggtggtgaattttcttccccaaaacaatctaaattctaccactattctgatacatggttatttgactgcgttgaaaggaaattcactaagttggagtttggcggtagagactcttctcccagcgccagatctggtcatagaattattgcttggaaaaactatttcatattatttggtggatttagagatttggggaatggtcaaacttcttacttgaatgatttgtggtgttttgatatctccacctacaaatggaccaaattggagacaaacagcaaacctgacgctagatctggtcattgtttcattcctacagataattctgccatattaatgggtggttactgtaaaatcattgccaaaaataataaaaatttaatgaagggaaaaatcttgaatgatgcatggaaattgaacttaacgcctgatccaaagaagtggcagtgggaaaaattaaagaatttcaagaaccagccctctccaagagtcgggtattctttcaatttatggaagcaaaacaagtccgttgcttttggtggtgtctacgatttacaagagacagaggaatccttagagtccgttttctataacgacctttatatgttccacttagagttgaacaaatggtctaaacttagaattaaacctcagcgtcaaacgaatagtaaaaattctcccgccacaagtaaaagaaaatctaataaagatcaagaaaaggaattacaggatttattgaattccattttagccaagtctaatttgaatgacgacgacgatgacaatgatgacaacagcacaacgggtcctaactctatcgatgacgacgaagataacgaagatgacagtgatttggacaaccaagaagatattaccatctctaatcaattacctcacccaagatttaacgcagcaacttgtgtagtgggcgactctttgttcatttacagtggtgtctgggaattaggcgaaaaagattatcctataaactctttttatagtatagatttgaacaagttggatggtgtcaaggtttactgggaagacttgtctgccatcgaagaagcaaagagattaggtgatagagattctgacgaagatgagtttgaatacgaggacgatgaggaggatgaggacgacggcgaagaggaacaagatgcaggaccccttgaaggtgatgaagatgaggaaagcgagagcgacgatgacaaacaagcgcagatggagattccagacgaaaggtcttggttaccacacccaaaaccgttcgaaactttaagagcattctacttaagggaaggtgcaaatttcttaacctggtctatttctaacaacagaaaccttaagggtaaacagttaaagacgaagagctttgagttatgtgaagaccgttggtgggaaagaagagatcaggtgacccttgaggaagagcgtttagaggatacaggcggaatcattgaaagagatacgactactaaaccttccaaaagaaggtga

SEQ ID NO: 10921 - DNA, 1467 bp, Saccharomyces cerevisiae
atgttgagatttaccaattgtagttgcaagactttcgtaaaatcgtcatataagcttaatataagaagaatgaactcctcgttcagaactgaaaccgatgcatttggtgagatacacgtgcctgctgataagtactggggtgcccaaactcaaagatcctttcaaaacttcaagattggtggcgctcgtgaaagaatgccattgcctttggtgcatgcatttggtgttttgaagaaatctgccgcgattgtgaatgagtctctggggggattggatcccaagatctccaaggctattcaacaggccgctgacgaagtggcttctggtaagctagacgaccactttccattggttgttttccaaacgggttccggtacccagtctaacatgaatgctaatgaagttatttccaatcgtgccattgagatcctaggaggcaagattggatctaaacaagtccatccaaacaatcattgcaaccaatctcaatcatccaatgatactttccccactgtcatgcatatcgctgccagtttgcaaattcaaaacgagttgatacctgagttgaccaatttaaagaacgcccttgaagccaaatccaaggaatttgaccatattgtgaagatcggtagaacacacttgcaagatgccacgcctttgacactaggtcaagagttttccggttacgtgcaacaagttgagaacggtatccaaagagtggcacattctttgaaaacattgagtttcctggcacaaggtggtactgccgttggtacagggttgaacaccaagcccggattcgatgtcaagatagccgagcaaatttccaaagaaactggactaaagtttcaaaccgcccctaataagttcgaggctttggctgctcacgacgccattgtcgaatgtagcggtgctctaaacacccttgcttgttctcttttcaaaatagcgcaagatataagatacttagggtccgggccacgttgcggctaccatgaactaatgctgccagagaatgaaccaggttcctcaatcatgcctggtaaagttaacccaacccaaaacgaggcattgactcaagtgtgtgtgcaagtcatgggtaacaatgcagctatcacgtttgccggctctcaaggtcaattcgagttaaatgtcttcaagccagtcatgatcgccaatctattgaattcgatcaggttaattactgatgccgcatattcatttagagtgcactgtgttgaaggtatcaaagccaatgagcctcgtattcatgagttgttgactaaatctttaatgttagtcaccgctttgaaccctaagatcggttatgatgccgcttccaaggtcgccaagaatgctcataagaagggcattaccttgaaggaaagtgcattggaattgggtgtattgactgaaaaggaatttgatgaatgggttgttcctgaacacatgctaggtcctaaataa

SEQ ID NO: 10922 - DNA, 1467 bp, Artificial Sequence
  Description of Artificial Sequence: Synthetic polynucleotide
atgttgagatttaccaattgtagttgcaagactttcgtaaaatcttcttataagcttaatataagaagaatgaactccagtttcagaactgaaaccgatgcatttggtgagatacacgtgcctgctgataagtactggggtgcccaaactcaaagatcctttcaaaacttcaagattggtggcgctcgtgaaagaatgccattgcctttggtgcatgcatttggtgttttgaagaaatctgccgcgattgtgaatgagtctttagggggattggatcccaagatctccaaggctattcaacaggccgctgacgaagtggcttctggtaagttggacgaccactttccattggttgttttccaaacgggttccggtacccagtctaacatgaatgctaatgaagttatttccaatcgtgccattgagatcttgggaggcaagattggatctaaacaagtccatccaaacaatcattgcaaccaatctcaatcttccaatgatactttccccactgtcatgcatatcgctgccagtttgcaaattcaaaacgagttgatacctgagttgaccaatttaaagaacgcccttgaagccaaatccaaggaatttgaccatattgtgaagatcggtagaacacacttgcaagatgccacgcctttgacattaggtcaagagttttccggttacgtgcaacaagttgagaacggtatccaaagagtggcacattctttgaaaacattgagtttcttggcacaaggtggtactgccgttggtacagggttgaacaccaagcccggattcgatgtcaagatagccgagcaaatttccaaagaaactggattgaagtttcaaaccgcccctaataagttcgaggctttggctgctcacgacgccattgtcgaatgtagcggtgctttgaacacccttgcttgttctcttttcaaaatagcgcaagatataagatacttagggtccgggccacgttgcggctaccatgaattgatgcttccagagaatgaaccaggttcctctatcatgcctggtaaagttaacccaacccaaaacgaggcattgactcaagtgtgtgtgcaagtcatgggtaacaatgcagctatcacgtttgccggctctcaaggtcaattcgagttaaatgtcttcaagccagtcatgatcgccaatttattgaattccatcaggttaattactgatgccgcatattcttttagagtgcactgtgttgaaggtatcaaagccaatgagcctcgtattcatgagttgttgactaaatctttaatgttagtcaccgctttgaaccctaagatcggttatgatgccgcttccaaggtcgccaagaatgctcataagaagggcattaccttgaaggaaagtgcattggaattgggtgtattgactgaaaaggaatttgatgaatgggttgttcctgaacacatgttgggtcctaaatga

SEQ ID NO: 10923 - DNA, 309 bp, Saccharomyces cerevisiae
atgctctttttagacagttattctcttctaatacaatttcagcgttttaaaaattgggaaagtcctcgaagatttagtagttcttttcctttgcttttgtttgtttttaaaccgatatttgctgctaaacttcttaaagagatttgctcttctggtgtactctcttattcgttatcatttctgaaaattcccctttccgtgatgcgggtaatactaggtcccttacccgacgacaagaaattaaaaaatgacgcaaaatattcatttatgaactattttattataacttgtataggaataataatgtag

SEQ ID NO: 10924 - DNA, 309 bp, Artificial Sequence
  Description of Artificial Sequence: Synthetic polynucleotide
atgctctttttagacagttattctcttttgatacaatttcagcgttttaaaaattgggaaagtcctagaagatttagtagttcttttcctttgcttttgtttgtttttaaaccgatatttgctgctaaacttcttaaagagatttgctcttctggtgtactctcttattctttatcttttttgaaaattcccctttccgtgatgagagtaatattaggtcccttacccgacgacaagaaattaaaaaatgacgcaaaatattcttttatgaactattttattataacttgtataggaataataatgtga

SEQ ID NO: 10925 - DNA, 1656 bp, Saccharomyces cerevisiae
atgtttgcatccgctggacaacaacaccctcaaattgttcctaaggaagaggaatccatattaaactacctccttgaagtgagatcctccttggctaaactcaagcaaaataggacccagtatttgaactctaaggatgtccaaactacttaccaacacgtcttgaccaaagtcagagagttggacgatattaggaagaatagtcatgagacgcccgctaagagcgccgccaccctgattcatagtactgaattgcataatagagttgactccgtactggatgatgtctttcaattgctctcgttgtgttttttaactgttgggctaaaaaattctgcacctgcgacttatgcatcgttatctactgtggagagtcttttggaacatttaaatgaatcaaacgtcttcacccatcacgatttgagtcctattaaggaaaggctggaagaaatcagcaagattgtcgaacaaaaaaactctagtcctgcgtacgatgaggatggaaatgatgaccgattaagggaaatcgacaacgaaaggaaaaagaataaaattgaggaagacctattactacgtgctaaattaaagcattgcaaggacgaatatgatatattggaaggcaaattggaggaaattgatccgtctttgtctactgtaatggaaaagttattccgaattagaagaggtttattgtcattagttgcatctgctaaaaaaacaatgtctaaatctgatattaataccaactctttattgcaggaacaaaatgatttgcaaacgaacaatgaaagcttaacggatgacaaacatttagtatctcaagagtatgtccatgagaaattatcagttttgaagaacgaattaagtgaattagaatctaatcgtgacgattctggtaaattcaagtccttggagtctcatcaggtggcagaaaaaggccaaagtgtccttaatggtttattggatgattgccatgatttagttaacgatttatcacaccaaaaaaatggcgggttgactttagatccatatttacagccaatatatgaacagctgattgatataaagactaccttagaaaatttaatgatcacaagaagatggactttgagagaaaccgatttattttcttaccaaaaaaaattgaacgaaattgataacaaaagaatcaatggtaagtttccaacaaaatctcaggactcaaaggggcaatcaatacttttatacctgttgcgtagatgttatgccataatttataaactgttggaaagttcagagcccgtatctgaagcgttgcagccaattcacaatcaactatctacagttcgtcgttgcctattagaattgaaaagaatgggaggtgtgaataatgaaagagagttatacccttatcaaatgaaattggcttcattggacaacctgagaactgaaggtatattctatgactctgatggcaatatacctgaaggccaaggtatattgaatgctttattagcagaatgttttgatatcttgcatgaattaaaagtggaagccgaggaaaaagcacagaactctacttcaagtgatggttctgacgacgatgacaacggagaatcaggcatagactcgaactcaaacgacagcgagcctgaatctgaatatcaacaggaatag

SEQ ID NO: 10926 - DNA, 1656 bp, Artificial Sequence
  Description of Artificial Sequence: Synthetic polynucleotide
atgtttgcatccgctggacaacaacaccctcaaattgttcctaaggaagaggaatccatattaaactacctccttgaagtgagatcctccttggctaaactcaagcaaaataggacccagtatttgaactctaaggatgtccaaactacttaccaacacgtcttgaccaaagtcagagagttggacgatattaggaagaatagtcatgagacgcccgctaagagcgccgccaccttgattcatagtactgaattgcataatagagttgactccgtattggatgatgtctttcaattgctctctttgtgttttttaactgttgggttgaaaaattctgcacctgcgacttatgcatctttatctactgtggagagtcttttggaacatttaaatgaatctaacgtcttcacccatcacgatttgagtcctattaaggaaaggttagaagaaatcagcaagattgtcgaacaaaaaaactctagtcctgcgtacgatgaggatggaaatgatgacagattaagggaaatcgacaacgaaaggaaaaagaataaaattgaggaagacttattattacgtgctaaattaaagcattgcaaggacgaatatgatatattggaaggcaaattggaggaaattgatccgtctttgtctactgtaatggaaaagttattcagaattagaagaggtttattgtctttagttgcatctgctaaaaaaacaatgtctaaatctgatattaataccaactctttattgcaggaacaaaatgatttgcaaacgaacaatgaaagcttaacggatgacaaacatttagtatctcaagagtatgtccatgagaaattaagtgttttgaagaacgaattaagtgaattagaatctaatcgtgacgattctggtaaattcaagtccttggagtctcatcaggtggcagaaaaaggccaaagtgtccttaatggtttattggatgattgccatgatttagttaacgatttatcccaccaaaaaaatggcgggttgactttagatccatatttacagccaatatatgaacagttgattgatataaagactaccttagaaaatttaatgatcacaagaagatggactttgagagaaaccgatttattttcttaccaaaaaaaattgaacgaaattgataacaaaagaatcaatggtaagtttccaacaaaatctcaggactccaaggggcaaagtatacttttatacttgttgcgtagatgttatgccataatttataaacttttggaaagtagtgagcccgtatctgaagcgttgcagccaattcacaatcaattatctacagttcgtcgttgccttttagaattgaaaagaatgggaggtgtgaataatgaaagagagttatacccttatcaaatgaaattggcttctttggacaacttgagaactgaaggtatattctatgactctgatggcaatatacctgaaggccaaggtatattgaatgctttattagcagaatgttttgatatcttgcatgaattaaaagtggaagccgaggaaaaagcacagaactctacttctagtgatggttctgacgacgatgacaacggagaaagtggcatagactccaactccaacgacagcgagcctgaatctgaatatcaacaggaatga

SEQ ID NO: 10927 - DNA, 1428 bp, Saccharomyces cerevisiae
atggcttctgcagtgtatttttgcgatcataatgggaaaccactcctatcaagaaggtatagagatgatattccgctttctgcaattgacaaattccctatattactctcggatttagaggaacaatcaaatctgattcctccatgtttgaaccacaatggtctggaatatctatttatacagcataacgatctatacgtggtggcaattgtgacttctcttagtgccaatgcggctgccatttttacttttttgcacaaattagtggaggtattaagtgactacttaaaaaccgttgaagaagaatctattagagataattttgttataatatatgaattactggacgaagtgatggattatggtataccacagatcacagaaactaagatgctgaaacagtacataacacaaaaatccttcaaactagttaaatccgccaagaagaagaggaatgctactagaccacccgtcgcactaacaaattcagtcagttggaggccagaaggcatcactcacaagaaaaatgaagcctttctggatatcgtcgaatctattaatatgctcatgactcaaaaaggtcaagttttgagatcagaaattatcggcgatgttaaggttaactcaaaattgtctggtatgcctgatctgaaattaggtattaatgataaaggcattttctccaaatatttggatgatgatacaaatatcccatcagcgagcgcgacaacatccgataataacacagaaactgataaaaaaccatcaataacatcatcatcggccacaaacaagaagaaagttaatattgaattggaagatttgaaatttcatcaatgtgtccgattaagcaaattcgagaatgaaaaaattataacgtttatacctcctgatggaaagttcgatttaatgaactacagactatctactacgataaaaccgttaatttggtgtgatgtaaacgttcaagttcattcgaattctagaattgaaattcactgtaaggccaaggcccaaattaaaagaaaatctactgcaactaatgtagagatattgataccggtcccggacgacgcggatacaccgacttttaaatattcacacgggtctctaaagtatgtccctgaaaaaagtgcaatcttatggaaaataagaagttttcccggtggtaaagagtactcaatgtctgccgaattgggactgccttcaatatcaaataacgaggatggcaatagaacaatgccaaaaagtaacgcggaaatcttgaagggacctgtccaaatcaaatttcaaataccctactttactacttcaggtattcaagtacgttatcttaaaattaacgaacccaaattgcagtataagagttacccatgggtaagatatatcacgcaaagtggtgatgattatacaataaggctgacgtaa

SEQ ID NO: 10928 - DNA, 1428 bp, Artificial Sequence
  Description of Artificial Sequence: Synthetic polynucleotide
atggcttctgcagtgtatttttgcgatcataatgggaaaccactcttgtccagaaggtatagagatgatattccgctttctgcaattgacaaattccctatattactctctgatttagaggaacaaagcaatttaattcctccatgtttgaaccacaatggtttggaatatttatttatacagcataacgatttatacgtggtggcaattgtgacttctcttagtgccaatgcggctgccatttttacttttttgcacaaattagtggaggtattaagtgactacttaaaaaccgttgaagaagaatctattagagataattttgttataatatatgaattattagacgaagtgatggattatggtataccacagatcacagaaactaagatgttgaaacagtacataacacaaaaatccttcaaattggttaaatccgccaagaagaagaggaatgctactagaccacccgtcgcattaacaaattctgtcagttggaggccagaaggcatcactcacaagaaaaatgaagcctttttggatatcgtcgaatctattaatatgctcatgactcaaaaaggtcaagttttgagaagtgaaattatcggcgatgttaaggttaactccaaattgtctggtatgcctgatttgaaattaggtattaatgataaaggcattttctccaaatatttggatgatgatacaaatatcccatctgcgagcgcgacaacatccgataataacacagaaactgataaaaaaccaagtataacatcttcttctgccacaaacaagaagaaagttaatattgaattggaagatttgaaatttcatcaatgtgtcagattaagcaaattcgagaatgaaaaaattataacgtttatacctcctgatggaaagttcgatttaatgaactacagattatctactacgataaaaccgttaatttggtgtgatgtaaacgttcaagttcattctaattctagaattgaaattcactgtaaggccaaggcccaaattaaaagaaaatctactgcaactaatgtagagatattgataccggtcccggacgacgcggatacaccgacttttaaatattctcacgggtctttgaagtatgtccctgaaaaaagtgcaatcttatggaaaataagaagttttcccggtggtaaagagtactccatgtctgccgaattgggattgccttccatatccaataacgaggatggcaatagaacaatgccaaaaagtaacgcggaaatcttgaagggacctgtccaaatcaaatttcaaataccctactttactacttctggtattcaagtacgttatcttaaaattaacgaacccaaattgcagtataagagttacccatgggtaagatatatcacgcaaagtggtgatgattatacaataaggttgacgtga

SEQ ID NO: 10929 - DNA, 1656 bp, Saccharomyces cerevisiae
atgacctattctacagttaatattaatacacctccaccatatctcgctttggccagcaatgaaaaattacccacagttttgtctattgctggaacagatccaagcggtggtgctggtgttgaagcagatgtgaaaactatcactgcacacagatgctatgctatgacatgcatcactgctttgaatgctcaaactccagttaaagtatacagcattaataacacgccaaaggaagtagtttcccaaattttggacgccaatttacaagacatgaaatgtgacgtcatcaagactggcatgcttacgacagctgctatcgaggttttgcacgaaaaactgctgcagctcggcgaaaatagacctaagctagtagttgacccagtccttgttgctacttcaggctcttctttagctggaaaggatatagccagtttaattacggagaaaatcgcaccttttgctgacattttgactcctaacattccggagtgtttcaaactgttaggtgaagacagagaaataagcaaattgcgagacattttcgaagtcgcaaaagaccttgccaaaatcaccaagtgttccaatattttggttaaaggtggtcacattccatggaatgatgaagaaggaaagtacatcactgatgtcctttacttaggggccgaacaaaggtttataaccttcaagggtaattttgttaatacaacccacactcatggtaccgggtgcaccctagcttccgccattgcatcaaatttggctcgcggttattcccttccccaatccgtttatggcggtattgagtacgtccaaaatgcggtggccattggctgcgatgtcacgaaagagactgttaaggacaacgggccaattaatcatgtctacgccatcgaaattccattagaaaaaatgctcagtgacgaatgtttcactgcatcagatgccgtacacaaaaagccagtcaaaagttctcttaacaaaatccctggaggaagtttctataaatatctgataaatcaccctaaagttaagccccactgggactcctatgtgaaccatgattttgttagaaaagtagcagacggttccttagagcctaagaagttccaattttttatcgaacaagattacctgtacttagtcaattatgccaggatttcctgcatcgcgggtagtaaatccccgtgtcttgaagacctggagaaagagctagttattgtcgaatgcgttcgtaatgggctttgccaacatgaaaggagattaagggaggaatttggaattaaggatcccgactacttacaaaagattcaaagaggtcctgcattaagggcttactgtcgttactttaatgatgtttccagaagaggtaactggcaggagttagttatagctcttaatccttgcttaatgggctatgttcacgctttgaccaagatcaaggatgaagtaactgcagcagaaggctccgtttaccgtgaatggtgtgaaacttactcatcgtcatggtgccacgaagctatgcttgaaggcgaaaagctgttgaatcacatcttggaaacataccctccagaaaaacttgatacactggtcacaatatatgctgaagtttgtgaattggaagctaacttctggaccgccgctctagaatatgaatga

SEQ ID NO: 10930 - DNA, 1656 bp, Artificial Sequence
  Description of Artificial Sequence: Synthetic polynucleotide
atgacctattctacagttaatattaatacacctccaccatatctcgctttggccagcaatgaaaaattacccacagttttgtctattgctggaacagatccaagcggtggtgctggtgttgaagcagatgtgaaaactatcactgcacacagatgctatgctatgacatgcatcactgctttgaatgctcaaactccagttaaagtatacagcattaataacacgccaaaggaagtagtttcccaaattttggacgccaatttacaagacatgaaatgtgacgtcatcaagactggcatgcttacgacagctgctatcgaggttttgcacgaaaaattattgcagctcggcgaaaatagacctaagttggtagttgacccagtccttgttgctacttctggctcttctttagctggaaaggatatagccagtttaattacggagaaaatcgcaccttttgctgacattttgactcctaacattccggagtgtttcaaattattaggtgaagacagagaaataagcaaattgagagacattttcgaagtcgcaaaagaccttgccaaaatcaccaagtgttccaatattttggttaaaggtggtcacattccatggaatgatgaagaaggaaagtacatcactgatgtcctttacttaggggccgaacaaaggtttataaccttcaagggtaattttgttaatacaacccacactcatggtaccgggtgcaccttggcttccgccattgcatctaatttggctcgcggttattcccttccccaatccgtttatggcggtattgagtacgtccaaaatgcggtggccattggctgcgatgtcacgaaagagactgttaaggacaacgggccaattaatcatgtctacgccatcgaaattccattagaaaaaatgctcagtgacgaatgtttcactgcatctgatgccgtacacaaaaagccagtcaaaagttctcttaacaaaatccctggaggaagtttctataaatatttgataaatcaccctaaagttaagccccactgggactcctatgtgaaccatgattttgttagaaaagtagcagacggttccttagagcctaagaagttccaattttttatcgaacaagattacttgtacttagtcaattatgccaggatttcctgcatcgcgggtagtaaatccccgtgtcttgaagacttggagaaagagttagttattgtcgaatgcgttcgtaatgggctttgccaacatgaaaggagattaagggaggaatttggaattaaggatcccgactacttacaaaagattcaaagaggtcctgcattaagggcttactgtcgttactttaatgatgtttccagaagaggtaactggcaggagttagttatagctcttaatccttgcttaatgggctatgttcacgctttgaccaagatcaaggatgaagtaactgcagcagaaggctccgtttaccgtgaatggtgtgaaacttactcttcttcttggtgccacgaagctatgcttgaaggcgaaaagttgttgaatcacatcttggaaacataccctccagaaaaacttgatacattggtcacaatatatgctgaagtttgtgaattggaagctaacttctggaccgccgctttggaatatgaatga

SEQ ID NO: 10931 - DNA, 582 bp, Saccharomyces cerevisiae
atgacagctcatgcaaatgaaaggattagcgatgtatcccctagtgctaggggttcaagttcggaatcgaagtatgacaagctctgccgagttcttttctttattgcaattacaaaaagctcattcactccggagcacatattgtataagcattcaatatttactgataagccaattttagctgatatagttacttttatgtatgcggcgtttgtttccattggatggtttctgatatggggggaaagagcatacagaactcaagaaatgggtcaacctccaatgtactcgaatataaactatcaccttttaagttttaagaaaagacaccccaagaaatttacatgtgcgttatggttggtatttttccttgcatatacggttttgacagttttaatttggttagttcagttgatttttcgaaaaggtaatgtttttcaaatgttattgcaacttattatattagatatcgccattgcattggtcaatgtagcaattgcattcacttttgaaatatatctttcacagaaagccgctatcgagattcgcgacgaaggtttaaataatcttgacaccgcttaa

SEQ ID NO: 10932 - DNA, 582 bp, Artificial Sequence
  Description of Artificial Sequence: Synthetic polynucleotide
atgacagctcatgcaaatgaaaggattagcgatgtatcccctagtgctaggggtagtagttctgaatccaagtatgacaagctctgcagggttcttttctttattgcaattacaaaaagctctttcactccggagcacatattgtataagcattccatatttactgataagccaattttagctgatatagttacttttatgtatgcggcgtttgtttccattggatggtttttaatatggggggaaagagcatacagaactcaagaaatgggtcaacctccaatgtactctaatataaactatcaccttttaagttttaagaaaagacaccccaagaaatttacatgtgcgttatggttggtatttttccttgcatatacggttttgacagttttaatttggttagttcagttgatttttagaaaaggtaatgtttttcaaatgttattgcaacttattatattagatatcgccattgcattggtcaatgtagcaattgcattcacttttgaaatatatctttctcagaaagccgctatcgagattcgcgacgaaggtttaaataatcttgacaccgcttga

SEQ ID NO: 10933 - DNA, 1638 bp, Saccharomyces cerevisiae
atggctagtgctgaaccaagaccccgtatgggactcgtcatcaatgctaaaccggactactatccgattgagctatctaatgcagaattactttctcacttcgaaatgctgcaagaataccaccaagaaatctccaccaatgttattgctcaatcatgtaagttcaaacctaatccaaaactaatagaccagcagcctgaaatgaaccccgtggaaacaaggtccaacattatcacttttttgttcgagctgtctgtggtcactcgagtgacaaatggtattttttttcattcagttagattatatgaccgctattgttccaagagaatcgtgttacgggaccaagccaaattggttgtcgctacttgtctctggttggctgctaaaacttggggcggttgtaatcacatcatcaataatgtagtcatccctactggcggaagattttatggtcccaacccaagggcacgtatacctcgactctctgaactagttcattactgtggtgatggtcaggtctttgatgaatcaatgtttttacaaatggaaagacatatactagacactttaaattggaacatttatgaaccaatgatcaatgattacgttttaaatgttgatgaaaattgtttgatgcaatacgaactttatgaaaatcaagttacttatgacaaacaatgctctgaaaaacgtcagtctcaattatcccaggatagtgatgccactgtagacgagaggccctaccaaaacgaagaagaagaagaagaagacttaaaactaaagatcaagttgattaatttgaaaaaattcttgattgatgtatccgcgtggcagtacgacttacttagatatgaacttttcgaagtatcgcacggcatattctccattatcaatcaattcaccaatcaagaccacggtccttttttaatgactccaatgacatcagaaagcaaaaatggtgaaattttgagtaccttaatgaacggcattgtttccattcctaactccttgatggaagtgtataaaacggtcaatggtgttctacccttcattaatcaagtgaaagaatatcacttggatctacaaagaaaactgcaaattgcatccaacttgaacatttcgagaaagcttaccatatcaaccccatcatgctctttcgaaaattcaaatagcacatccattccttcgcccgcttcctcatctcaaagccacactccaatgagaaacatgagctcactctctgataacagcgttttcagccggaatatggaacaatcatcaccaatcactccaagtatgtaccaatttggtcagcagcagtcaaacagtatatgtggtagcaccgttagtgtgaatagtctggtgaatacaaataacaaacaaaggatctacgaacaaatcacgggtcctaacagcaataacgcaaccaatgattatattgatttgctaaacctaaatgagtctaacaaggaaaaccaaaatcccgcaacggcgcattacctcaatgggggcccacccaagacaagcttcattaaccatggaatgttcccctcgccaactgggaccataaatagcggtaaatctagcagtgcctcatctttaatttcttttggtatgggcaatacccaagtaatatag

SEQ ID NO: 10934 - DNA, 1638 bp, Artificial Sequence
  Description of Artificial Sequence: Synthetic polynucleotide
atggctagtgctgaaccaagaccccgtatgggactcgtcatcaatgctaaaccggactactatccgattgagctttctaatgcagaattactttctcacttcgaaatgttacaagaataccaccaagaaatctccaccaatgttattgctcaaagctgtaagttcaaacctaatccaaaattgatagaccagcagcctgaaatgaaccccgtggaaacaaggtccaacattatcacttttttgttcgagctttctgtggtcactagagtgacaaatggtattttttttcattctgttagattatatgaccgctattgttccaagagaatcgtgttaagagaccaagccaaattggttgtcgctacttgtctctggttggctgctaaaacttggggcggttgtaatcacatcatcaataatgtagtcatccctactggcggaagattttatggtcccaacccaagggcacgtatacctcgtctctctgaattggttcattactgtggtgatggtcaggtctttgatgaaagtatgtttttacaaatggaaagacatatattggacactttaaattggaacatttatgaaccaatgatcaatgattacgttttaaatgttgatgaaaattgtttgatgcaatacgaactttatgaaaatcaagttacttatgacaaacaatgctctgaaaaacgtcagtctcaattatcccaggatagtgatgccactgtagacgagaggccctaccaaaacgaagaagaagaagaagaagacttaaaattgaagatcaagttgattaatttgaaaaaattcttgattgatgtatccgcgtggcagtacgacttacttagatatgaacttttcgaagtaagccacggcatattctccattatcaatcaattcaccaatcaagaccacggtccttttttaatgactccaatgacaagtgaaagcaaaaatggtgaaattttgagtaccttaatgaacggcattgtttccattcctaactccttgatggaagtgtataaaacggtcaatggtgttttgcccttcattaatcaagtgaaagaatatcacttggatttgcaaagaaaattacaaattgcatccaacttgaacatttctagaaagcttaccatatctaccccaagttgctctttcgaaaatagtaatagcacatccattccttctcccgcttcctcttctcaaagccacactccaatgagaaacatgagctctctctctgataacagcgttttcagcagaaatatggaacaatcttctccaatcactccaagtatgtaccaatttggtcagcagcagtccaacagtatatgtggtagcaccgttagtgtgaatagtttagtgaatacaaataacaaacaaaggatctacgaacaaatcacgggtcctaacagcaataacgcaaccaatgattatattgatttgttgaacttgaatgagtctaacaaggaaaaccaaaatcccgcaacggcgcattacctcaatgggggcccacccaagacaagcttcattaaccatggaatgttcccctctccaactgggaccataaatagcggtaaatctagcagtgcctcttctttaatttcttttggtatgggcaatacccaagtaatatga

SEQ ID NO: 10935 - DNA, 1158 bp, Saccharomyces cerevisiae
atgaatcaggaagacaacacgggcggagggggcatttttggtcttttcaaatggactaaggatgcgctgtttggtacggacatatcaccttcaatgaaatataaagatcaggaagaacgaagagaccgatctaggtatgcccaagacgacacaaatttttctatgaagtttggaaatgactccaacaggaggagtacaaacttatcgaggtcaaattcgtggtctggtctggattcaacgctccataggaagtacgagttactcccagagtacaacgagaacggctttaactcaattgttaacggtgaccaccacagcaaagagagaatacgatctttacgaagtcctgctccgatagtaccgagagaaccacttcgtaacgaacctacggatacatttggtcacagactacacacaaaaaggagaactataaatgagctttccaattcgcagataccctttataccacctcaggaagacgaccctttgctctcgaaattatttaacaaggatggagttaatgaggttagaagatcgccctataagttatcggttaaagatataccaggcaaatttccatctcccttaacaaaacgtgatgaaatagacaattactatgtccgggacgaagatgcttgccacaagaatagagagtataaaaaggcatattttgatctttttgcacaaatggacttgaacagtagagacctggaagatttgtgtgaggatgttagagagcagcgtgagcaattccacaggaatgagcaaacttataagcaagcatacgaggaaatgagagcagaactggtcaacgagttgaagaaatctaagacactctttgaaaattattattcattaggtcagaagtacaagagtttgaaaaaggtccttgatcaaacgatcagtcatgaggctgaactggccacttctagggaacggctgtatcaggaggaggatttgaaaaactttgaaatacaaacattgaagcaaagactatccgatttagagctgaaatataccaatttgcaaatagaaaaggacatgcagcgggacaattatgaatccgaaatacatgatttattattacagcttagccttcgtaataacgagagaaaagatacttctgctggttcgaatattttttcaacaggacaatag

SEQ ID NO: 10936 - DNA, 1158 bp, Artificial Sequence
  Description of Artificial Sequence: Synthetic polynucleotide
atgaatcaggaagacaacacgggcggagggggcatttttggtcttttcaaatggactaaggatgcgttatttggtacggacatatctccttctatgaaatataaagatcaggaagaaagaagagacagatctaggtatgcccaagacgacacaaatttttctatgaagtttggaaatgactccaacaggaggagtacaaacttatctaggtctaattcttggtctggtttggattctacgctccataggaagtacgagttactcccagagtacaacgagaacggctttaactctattgttaacggtgaccaccacagcaaagagagaataagatctttaagaagtcctgctccgatagtaccgagagaaccacttcgtaacgaacctacggatacatttggtcacagattgcacacaaaaaggagaactataaatgagctttccaattctcagataccctttataccacctcaggaagacgaccctttgctctctaaattatttaacaaggatggagttaatgaggttagaagatctccctataagttaagtgttaaagatataccaggcaaatttccatctcccttaacaaaacgtgatgaaatagacaattactatgtcagagacgaagatgcttgccacaagaatagagagtataaaaaggcatattttgatctttttgcacaaatggacttgaacagtagagacttggaagatttgtgtgaggatgttagagagcagcgtgagcaattccacaggaatgagcaaacttataagcaagcatacgaggaaatgagagcagaattggtcaacgagttgaagaaatctaagacactctttgaaaattattattctttaggtcagaagtacaagagtttgaaaaaggtccttgatcaaacgatcagtcatgaggctgaattggccacttctagggaaagattatatcaggaggaggatttgaaaaactttgaaatacaaacattgaagcaaagattatccgatttagagttgaaatataccaatttgcaaatagaaaaggacatgcagagagacaattatgaatccgaaatacatgatttattattacagcttagccttcgtaataacgagagaaaagatacttctgctggtagtaatattttttctacaggacaatga

SEQ ID NO: 10937 - DNA, 1467 bp, Saccharomyces cerevisiae
atgtcagctatacaatcgccagcacctaaacctctgcagccaacttatccagctgcttcgccagcttccacgaatgcatatatgaagccgggcctaattggtagtcctgccgtcagtaatcataccgagcctaacaatggtaacaatgaaactgcggagcctcagggaccaaatcagagaattgatttgggtgccatgatcgaagaattaacctcactattgggaaaagaaagctggacgaaatatgctcagatcatcagtcttttcattttagggaagttatccagaaaggaactttctaatgaattagagctggtattttcaccaagcgctgcaagcttagaaaaatcaaatacaaatcatcaccatagtttagtacgacttcataaccaacttttattagggatttttgctaattcattacgtgaaaaccctcttgggagaaacggtaatgagagttcttggggatttggcaatggaagcaacaatccaaacaataaactaaaaagaatcaataagcataactctcaaattgaagtctataaaaaaattgtcatgtcgttacctctaaatgatcgaaatagacttaaaatgatcacgaaagaggccggcaaaagaggcttcattttttgctctgtatttcaagccagattaaataatatacccaaaattcccattgtaaccaatccagaaagtttgaagcgtgtcaagagcaataatttaaaaacgccgctggaatggtcacaagatataatgaatggattcaacgttcctttagcgagcgaaagccattctttaccagacacggattcgttttacttaagaatggttggtatagcaagagaacatgggttagtcggcacagtggacgcacgttgcgtagagcttatatcattggccctagatcaatatctaaaaaatataatagagtttactattgatacagttcgttatagaaggaagaaatattcagattattatgatttgaatgagagtgggctttataaatccgtatcagaaatggctgctgataaacgcgatgccaaaattaagcagttagatgatgataaaaatgaggatgaatgtgccgatgaagccaaaagtattaataacggcaataacagtagcaaggacgatattggcgacatatcaatgagcagcattacaaaggctggcgaagcagttaatgaggagttacatgaaaacagaacgatatcattaacgaatgaagacatatatgattcgttatctatatttccgaatttggttgaaccttcaggttcatactatgcgttaactaatttagggctagttaacgatgatgaactagtagatatgaagagcaatattgacgacttgccggacttcttaaatgaaaagccgactttcacgcctttggatgaaagaaacgttggtacaaggcatgaattaaattggttaattaaaggaatcttaacggaagattga

SEQ ID NO: 10938 - DNA, 1467 bp, Artificial Sequence
  Description of Artificial Sequence: Synthetic polynucleotide
atgtctgctatacaatctccagcacctaaacctttgcagccaacttatccagctgcttctccagcttccacgaatgcatatatgaagccgggcttaattggtagtcctgccgtcagtaatcataccgagcctaacaatggtaacaatgaaactgcggagcctcagggaccaaatcagagaattgatttgggtgccatgatcgaagaattaacctctttgttgggaaaagaaagctggacgaaatatgctcagatcatcagtcttttcattttagggaagttatccagaaaggaactttctaatgaattagagttggtattttctccaagcgctgcaagcttagaaaaatctaatacaaatcatcaccatagtttagtacgtcttcataaccaacttttattagggatttttgctaattctttacgtgaaaaccctcttgggagaaacggtaatgagagttcttggggatttggcaatggaagcaacaatccaaacaataaattgaaaagaatcaataagcataactctcaaattgaagtctataaaaaaattgtcatgtctttacctttaaatgatagaaatagacttaaaatgatcacgaaagaggccggcaaaagaggcttcattttttgctctgtatttcaagccagattaaataatatacccaaaattcccattgtaaccaatccagaaagtttgaagcgtgtcaagagcaataatttaaaaacgccgttggaatggtctcaagatataatgaatggattcaacgttcctttagcgagcgaaagccattctttaccagacacggattctttttacttaagaatggttggtatagcaagagaacatgggttagtcggcacagtggacgcacgttgcgtagagcttatatctttggccttggatcaatatttgaaaaatataatagagtttactattgatacagttcgttatagaaggaagaaatattctgattattatgatttgaatgagagtgggctttataaatccgtatctgaaatggctgctgataaacgcgatgccaaaattaagcagttagatgatgataaaaatgaggatgaatgtgccgatgaagccaaaagtattaataacggcaataacagtagcaaggacgatattggcgacatatccatgagcagcattacaaaggctggcgaagcagttaatgaggagttacatgaaaacagaacgatatctttaacgaatgaagacatatatgattctttatctatatttccgaatttggttgaaccttctggttcttactatgcgttaactaatttagggttggttaacgatgatgaattggtagatatgaagagcaatattgacgacttgccggacttcttaaatgaaaagccgactttcacgcctttggatgaaagaaacgttggtacaaggcatgaattaaattggttaattaaaggaatcttaacggaagattga

SEQ ID NO: 10939 - DNA, 1944 bp, Saccharomyces cerevisiae
atggcgtcacagcaaaacaaacacgcttttctttcaaagaatagaatctttcacaatcccgataatgtgtcctcatcaaaatctcgaaaccttatggatatcacaaacacgacaaacaccatgaatggctctagaccttcgtctatgaagagttcattggctcttccacccgtaaaggattccttcccatctgtatctcgatctgcatcattaaacatcaacatgagcaaaattaaggacttaaaagaccgccaagacaaaataaggttccaaagacatactctcaggactcaattgattgagtgcgaaagagaaatcaaaaccatcaagtttcgagatctcaataagtccaggtttgaactttataagaaaaaatccaaacaagcaaagtatctcaaacaggttagagatttgacgcaaaatctgaactccaaggacggtgaacgcgctgatttaattaagaagaacaaatccgctttggcaaccttgcaggctgaactcgaccagaatctgatcttgaaaaggcaggaatctcaagaattgtacaataataagcttatcttttgggaaaatgagctgcaaataatggaaaatgtcgagcctgaccacgaaatcacagaggaaatatctcagttgaagaaaacgctgcaagagctcaacataaattgggcgaatttacagaagcaaaacttggaaagacaagtaaaccacgaatcacaattgaggaaggattttattgcattcaaagaagctaagttaaaatccatggaaaatttgacaaacaaacatcgtgaattacttgatcagatagccactctacaatcggaaagtgagaagttacacaaggagatcatggatatagatagacaagctgaatattcggaacaaaacatctcagaaataaatgaaaatataaaacaattggaattggcaaacaacccactaataagcaaatccttacaaaactcgcaagatttggaacatttacaaaaccaaatggaaaatttgaaagaaatggcctctaaacaggaaaaattttataatgatacctataacactgtggaaaaagaactcctgcggagtaggagacttgaaaactctattattgaacaaaaaggcacgatgcgctgttacgcttacgtgatggagcaaaatttgcctgagaaccttttatttgattacgaaaatggcgtaataacccaaggtctaagcgaacatgtttacaaatttaatagggtgataccgcatttaaaagtttctgaagataaatttttcactcaagagtatagcgtttaccatgatatgtgcctgaaccaaaaaaaaaatttcaacttaatatctctaagcaccactccacatggctcattgagagagtctctaataaaatttttggccgaaaaggatacaatatatcaaaaacaatatgtgatcaccttacagtttgtatttttatcagatgacgaattttctcaggacatgctcttggattattcccacaatgataaagatagcataaagttgaaatttgaaaaacactcaatttctttggattccaaacttgtcatcatagaaaatggactcgaagatttgcccttaaattttagttgtgatgaacacccaaatttacctcattctgggatgggtataatcaaggtgcagttttttcctcgagattcaaaaagcgatggcaacaatgaccccgtaccggtggacttttattttatcgagttaaataatctgaagtccattgaacagtttgataaaagcatctttaagaaggaatcatgcgagacccctattgcacttgttctgaaaaaactaatttctgatactaaatcctttttcttgctaaacttgaacgattcaaaaaatgtcaataaattattaacgatttcagaagaagttcaaacacaactttgtaaaagaaagaaaaagctcacttaa

SEQ ID NO: 10940 - DNA, 1944 bp, Artificial Sequence
  Description of Artificial Sequence: Synthetic polynucleotide
atggcgtctcagcaaaacaaacacgcttttctttccaagaatagaatctttcacaatcccgataatgtgtcctcttctaaatctagaaaccttatggatatcacaaacacgacaaacaccatgaatggctctagaccttcttctatgaagagttctttggctcttccacccgtaaaggattccttcccatctgtatctcgttctgcatctttaaacatcaacatgagcaaaattaaggacttaaaagaccgccaagacaaaataaggttccaaagacatactctcaggactcaattgattgagtgcgaaagagaaatcaaaaccatcaagtttagagatctcaataagtccaggtttgaactttataagaaaaaatccaaacaagcaaagtatctcaaacaggttagagatttgacgcaaaatttgaactccaaggacggtgaacgcgctgatttaattaagaagaacaaatccgctttggcaaccttgcaggctgaactcgaccagaatttgatcttgaaaaggcaggaatctcaagaattgtacaataataagcttatcttttgggaaaatgagttacaaataatggaaaatgtcgagcctgaccacgaaatcacagaggaaatatctcagttgaagaaaacgttacaagagctcaacataaattgggcgaatttacagaagcaaaacttggaaagacaagtaaaccacgaatctcaattgaggaaggattttattgcattcaaagaagctaagttaaaatccatggaaaatttgacaaacaaacatcgtgaattacttgatcagatagccactttacaaagtgaaagtgagaagttacacaaggagatcatggatatagatagacaagctgaatattctgaacaaaacatcagtgaaataaatgaaaatataaaacaattggaattggcaaacaacccattgataagcaaatccttacaaaactctcaagatttggaacatttacaaaaccaaatggaaaatttgaaagaaatggcctctaaacaggaaaaattttataatgatacctataacactgtggaaaaagaactcttgagaagtaggagacttgaaaactctattattgaacaaaaaggcacgatgcgctgttacgcttacgtgatggagcaaaatttgcctgagaaccttttatttgattacgaaaatggcgtaataacccaaggtttaagcgaacatgtttacaaatttaatagggtgataccgcatttaaaagtttctgaagataaatttttcactcaagagtatagcgtttaccatgatatgtgcttgaaccaaaaaaaaaatttcaacttaatatctttaagcaccactccacatggctctttgagagagtctttgataaaatttttggccgaaaaggatacaatatatcaaaaacaatatgtgatcaccttacagtttgtatttttaagtgatgacgaattttctcaggacatgctcttggattattcccacaatgataaagatagcataaagttgaaatttgaaaaacactctatttctttggattccaaacttgtcatcatagaaaatggactcgaagatttgcccttaaattttagttgtgatgaacacccaaatttacctcattctgggatgggtataatcaaggtgcagttttttcctagagattctaaaagcgatggcaacaatgaccccgtaccggtggacttttattttatcgagttaaataatttgaagtccattgaacagtttgataaaagcatctttaagaaggaaagttgcgagacccctattgcacttgttttgaaaaaattgatttctgatactaaatcctttttcttgttgaacttgaacgattctaaaaatgtcaataaattattaacgatttctgaagaagttcaaacacaactttgtaaaagaaagaaaaagctcacttga

SEQ ID NO: 10941 - DNA, 519 bp, Saccharomyces cerevisiae
atgctgaaaattgttactcgggctggacacacagctagaatatcgaacatcgcagcacatcttttacgcacctctccatctctgctcacacgcaccaccacaaccacaagatttctgcccttctctacgtcttcgttcttaaaccatggccatttgaaaaaaccgaaaccaggcgaagaactgaagataacttttattctgaaggatggctcccagaagacgtacgaagtctgtgagggcgaaaccatcctggacatcgctcaaggtcacaacctggacatggagggcgcatgcggcggttcttgtgcctgctccacctgtcacgtcatcgttgatccagactactacgatgccctgccggaacctgaagatgatgaaaacgatatgctcgatcttgcttacgggctaacagagacaagcaggcttgggtgccagattaagatgtcaaaagatatcgatgggattagagtcgctctgccccagatgacaagaaacgttaataacaacgattttagttaa

SEQ ID NO: 10942 - DNA, 519 bp, Artificial Sequence
  Description of Artificial Sequence: Synthetic polynucleotide
atgttgaaaattgttactagagctggacacacagctagaataagcaacatcgcagcacatcttttacgcacctctccatctttactcacacgcaccaccacaaccacaagatttttgcccttctctacgtcttctttcttaaaccatggccatttgaaaaaaccgaaaccaggcgaagaattgaagataacttttattttgaaggatggctcccagaagacgtacgaagtctgtgagggcgaaaccatcttggacatcgctcaaggtcacaacttggacatggagggcgcatgcggcggttcttgtgcctgctccacctgtcacgtcatcgttgatccagactactacgatgccttaccggaacctgaagatgatgaaaacgatatgctcgatcttgcttacgggttgacagagacaagcaggcttgggtgccagattaagatgtccaaagatatcgatgggattagagtcgctcttccccagatgacaagaaacgttaataacaacgattttagttga

SEQ ID NO: 10943 - DNA, 411 bp, Saccharomyces cerevisiae
atgtcctctgtggaatcttcccccatctcgcgctatgaagacgaggtcttccctctttcgttttcaaacgttgctttcgagccccctatgctctcgcatagcccggacagatcgacttatgccgatgacttttctcaatcttaccagcaagaattgctaacttttccgctatcgtacccgattgtcgatgagtcagaatgcacgcacactaaagataagacggacagcaacataataacgagtactgaagacgattgcatgttcgatatggaatttaacggcaacgccgccagtgcagttgctgctgctagtaaggaatctaactctgcctctgggtttgcctttgcaagtaacgatgcctttgccaatgtcgcacaacagaactacagactgtggttgtcatcggtatga

SEQ ID NO: 10944 - DNA, 411 bp, Artificial Sequence
  Description of Artificial Sequence: Synthetic polynucleotide
atgtcctctgtggaatcttcccccatcagccgctatgaagacgaggtcttccctctttctttttccaacgttgctttcgagccccctatgctctctcatagcccggacagatctacttatgccgatgacttttctcaatcttaccagcaagaattgttgacttttccgttatcttacccgattgtcgatgagagtgaatgcacgcacactaaagataagacggacagcaacataataacgagtactgaagacgattgcatgttcgatatggaatttaacggcaacgccgccagtgcagttgctgctgctagtaaggaatctaactctgcctctgggtttgcctttgcaagtaacgatgcctttgccaatgtcgcacaacagaactacagattatggttgtcttctgtatga

SEQ ID NO: 10945 - DNA, 303 bp, Saccharomyces cerevisiae
atggctgtcaagactggtatcgctattggtttgaacaagggtaagaaagtcacccaaatgactccagccccaaagatctcctacaagaagggtgctgcctccaacagaaccaagttcgtcagatctttggttagagaaatcgccggtttgtccccatatgaaagaagattgatcgatttgatcagaaactccggtgaaaagagagccagaaaggtcgccaagaagagattgggttctttcaccagagccaaggctaaggtcgaagaaatgaacaacatcattgctgcctctcgtcgtcattaa

SEQ ID NO: 10946 - DNA, 303 bp, Artificial Sequence
  Description of Artificial Sequence: Synthetic polynucleotide
atggctgtcaagactggtatcgctattggtttgaacaagggtaagaaagtcacccaaatgactccagccccaaagatctcctacaagaagggtgctgcctccaacagaaccaagttcgtcagatctttggttagagaaatcgccggtttgtccccatatgaaagaagattgatcgatttgatcagaaactccggtgaaaagagagccagaaaggtcgccaagaagagattgggttctttcaccagagccaaggctaaggtcgaagaaatgaacaacatcattgctgcctctcgtcgtcattga

SEQ ID NO: 10947 - DNA, 2685 bp, Saccharomyces cerevisiae
atgtcttcagacaaatctattgagaaaaatacagatacgatcgcctctgaagttcacgaaggtgataatcattcgaataatttgggttcaatggaggaagagataaaatcaacgccatcagaccaatatgaagagatagctataattccaactgagcccctccattcggacaaagaactaaatgacaagcaacaaagtttaggccatgaagcacccacaaatgtatcaagagaagaacctattgggatctctggtgatgaagacacccaaatcactgaacaaaacgttaatgaacaaaggcaagaaacgagagaacctagttctgaaattgatttaaatgagccattggatgttgaaaaagatgtgacaacggatgtgcaagccccaaatgggctgaatattgaaaaagaatatgatgcagtcaaagagaatgagaaggtttacgctgatacgaaagaggttgttagtagtccagaaaatagggaagtaactggaaaaaattctggaggtgagaaatcatcctcgagtaaatttctcgatgacgaatctggtactacgacagctgcaaatgcgaacgacatttctataagtagtgaagtaaccccagaaaggtcgtcagaaaatgataataaccagattcatattaccaatgaggtagccgcaggaataaacttgaatgaaaacaaggaacaaaaagctgctatagaagatgggcccgtaacagcagagaatctttcctcagaaactgctaggaaagtaccacctatacccacacaaatcataaatgaaaaaggtgataactcaagcgagaacgaggtttccgcaattcccactacatcttcgccaccattaccacctagacaaaatgttgcgacatcaacgtcaccaaaattacctccaaggggcaaacaaagggaacaaccaccgaagacgaagaatgctgttccaccgccactagaggaagaaatgaagtcagagaagttccgtaaaaacttcgaagaaactaaaagaaatagttatcatcatgttcctctcactggttccaaaactgcgcaattagagtccactgcagaaattaatttgatcgctagtcgttaccgcaagaccagtcaccatttgaataaagagggggaagaaactagagagtcgttgcaggaaggtcaaagctttttaaaatcgacatttacgtcatttctggagaacttgtccgagtataacgaagtggagaatgttaatgaagaagatagagaaatgtttaaaattgattggtccttctggactcaagtagttaatgattatgctacagtggcaagcaacgaaccagaaaatttagaagcccatgttaccaatgggataccaccacaaattcgaggtatcatttggcagctgatggcgaattccaaatcaagagaaatggaagatatatatgaaactctattggataccgaatgtcttcatgaagcaacaatacgtagagatttaaggagaacgaagtttgtggccgaggacaaaatggagtcactatacaaggtaataaaggtgtattctgtttatgatccagatgttgggtacacgcaaggcatggggttcattgcagcgccgctattaataaactgtgaaaacgaggccgaatcttttggactactcgttggattaatgaagaattatggattaagagagcttttcttaccaggaatgcctgggctgatgttaatgctttatcaatttgatagattattagaggagcattcaccttctttgtacaatcgcttgatccgtgagggaattagctccacaatgtacgctacacaatggtttttgacatttttcgcatacaagtttccgttagagtttgtgttaagaatttttgatattgtattcgtagagggtattgaagtgcttttgaagtttgctgtaaatttaatgttaaagaatgaagaaactttagtaaaattgagattcgatgaactattggattttttaaaggacgaactcttcaattactatttaatgggaaaccaggatgacgcttctgtagtgcaaatgggattgtcaaatgggaactcatttaagggcaatgatgacggcactttttcctacaatgtcgatcttttcgttcatgatgcaatgacaggtgtatatatcacaccattaacattaagaagatacaggggagagtacgtagaaatccatgaaaaagagcaaaaaaaagaggaccactacgaatcactaagaattcaaaaccaccaactacaaagagaggcgcagaagctagaacacgactattcaattttgaacaaagagaatatcagcgccgctaacgagctgattcagaacagattgaatatggagatgctgttggatgaaaaaaacgacctgataaatacaatcactgatatcaaaagccaaattgaggaagagattcgcaagcaaaatttaccgaacccggacgcgtcactaccaaaggcagatctgagagaagacttggaaaggaccatatccaggaacaatgaggtgatgagggagaacggccaattagaggaaagaatcactgaactgcaagcggaaatcgatgagttgattaacatcaataaggagcaagtgtccacggcatcgttattggaacgagattctaaggctaaagggaggaaaggctggactggttttaaaaaagtttttaaatag

SEQ ID NO: 10948 - DNA, 2685 bp, Artificial Sequence
  Description of Artificial Sequence: Synthetic polynucleotide
atgtcttctgacaaatctattgagaaaaatacagatacgatcgcctctgaagttcacgaaggtgataatcattctaataatttgggttctatggaggaagagataaaatctacgccatctgaccaatatgaagagatagctataattccaactgagcccctccattctgacaaagaattgaatgacaagcaacaaagtttaggccatgaagcacccacaaatgtatctagagaagaacctattgggatctctggtgatgaagacacccaaatcactgaacaaaacgttaatgaacaaaggcaagaaacgagagaacctagttctgaaattgatttaaatgagccattggatgttgaaaaagatgtgacaacggatgtgcaagccccaaatgggttaaatattgaaaaagaatatgatgcagtcaaagagaatgagaaggtttacgctgatacgaaagaggttgttagtagtccagaaaatagggaagtaactggaaaaaattctggaggtgagaaatcttcctccagtaaatttctcgatgacgaatctggtactacgacagctgcaaatgcgaacgacatttctataagtagtgaagtaaccccagaaaggagttctgaaaatgataataaccagattcatattaccaatgaggtagccgcaggaataaacttgaatgaaaacaaggaacaaaaagctgctatagaagatgggcccgtaacagcagagaatctttccagtgaaactgctaggaaagtaccacctatacccacacaaatcataaatgaaaaaggtgataactccagcgagaacgaggtttccgcaattcccactacatcttctccaccattaccacctagacaaaatgttgcgacaagtacgtctccaaaattacctccaaggggcaaacaaagggaacaaccaccgaagacgaagaatgctgttccaccgccattggaggaagaaatgaagagtgagaagttccgtaaaaacttcgaagaaactaaaagaaatagttatcatcatgttcctctcactggttccaaaactgcgcaattagagtccactgcagaaattaatttgatcgctagtcgttaccgcaagaccagtcaccatttgaataaagagggggaagaaactagagagtctttgcaggaaggtcaaagctttttaaaatctacatttacgtcttttttggagaacttgtccgagtataacgaagtggagaatgttaatgaagaagatagagaaatgtttaaaattgattggtccttctggactcaagtagttaatgattatgctacagtggcaagcaacgaaccagaaaatttagaagcccatgttaccaatgggataccaccacaaattagaggtatcatttggcagttgatggcgaattccaaatctagagaaatggaagatatatatgaaactttattggataccgaatgtcttcatgaagcaacaatacgtagagatttaaggagaacgaagtttgtggccgaggacaaaatggagtctttgtacaaggtaataaaggtgtattctgtttatgatccagatgttgggtacacgcaaggcatggggttcattgcagcgccgttgttaataaactgtgaaaacgaggccgaatcttttggattactcgttggattaatgaagaattatggattaagagagcttttcttaccaggaatgcctgggttgatgttaatgctttatcaatttgatagattattagaggagcattctccttctttgtacaatcgcttgatccgtgagggaattagctccacaatgtacgctacacaatggtttttgacatttttcgcatacaagtttccgttagagtttgtgttaagaatttttgatattgtattcgtagagggtattgaagtgcttttgaagtttgctgtaaatttaatgttaaagaatgaagaaactttagtaaaattgagattcgatgaattattggattttttaaaggacgaactcttcaattactatttaatgggaaaccaggatgacgcttctgtagtgcaaatgggattgagcaatgggaactcttttaagggcaatgatgacggcactttttcctacaatgtcgatcttttcgttcatgatgcaatgacaggtgtatatatcacaccattaacattaagaagatacaggggagagtacgtagaaatccatgaaaaagagcaaaaaaaagaggaccactacgaatctttgagaattcaaaaccaccaattacaaagagaggcgcagaagttggaacacgactattctattttgaacaaagagaatatcagcgccgctaacgagttgattcagaacagattgaatatggagatgcttttggatgaaaaaaacgacttgataaatacaatcactgatatcaaaagccaaattgaggaagagattcgcaagcaaaatttaccgaacccggacgcgtctttaccaaaggcagatttgagagaagacttggaaaggaccatatccaggaacaatgaggtgatgagggagaacggccaattagaggaaagaatcactgaattacaagcggaaatcgatgagttgattaacatcaataaggagcaagtgtccacggcatctttattggaaagagattctaaggctaaagggaggaaaggctggactggttttaaaaaagtttttaaatga

SEQ ID NO: 10949 - DNA, 2646 bp, Saccharomyces cerevisiae
atgaagctactgtcttctatcgaacaagcatgcgatatttgccgacttaaaaagctcaagtgctccaaagaaaaaccgaagtgcgccaagtgtctgaagaacaactgggagtgtcgctactctcccaaaaccaaaaggtctccgctgactagggcacatctgacagaagtggaatcaaggctagaaagactggaacagctatttctactgatttttcctcgagaagaccttgacatgattttgaaaatggattctttacaggatataaaagcattgttaacaggattatttgtacaagataatgtgaataaagatgccgtcacagatagattggcttcagtggagactgatatgcctctaacattgagacagcatagaataagtgcgacatcatcatcggaagagagtagtaacaaaggtcaaagacagttgactgtatcgattgactcggcagctcatcatgataactccacaattccgttggattttatgcccagggatgctcttcatggatttgattggtctgaagaggatgacatgtcggatggcttgcccttcctgaaaacggaccccaacaataatgggttctttggcgacggttctctcttatgtattcttcgatctattggctttaaaccggaaaattacacgaactctaacgttaacaggctcccgaccatgattacggatagatacacgttggcttctagatccacaacatcccgtttacttcaaagttatctcaataattttcacccctactgccctatcgtgcactcaccgacgctaatgatgttgtataataaccagattgaaatcgcgtcgaaggatcaatggcaaatcctttttaactgcatattagccattggagcctggtgtatagagggggaatctactgatatagatgttttttactatcaaaatgctaaatctcatttgacgagcaaggtcttcgagtcaggttccataattttggtgacagccctacatcttctgtcgcgatatacacagtggaggcagaaaacaaatactagctataattttcacagcttttccataagaatggccatatcattgggcttgaatagggacctcccctcgtccttcagtgatagcagcattctggaacaaagacgccgaatttggtggtctgtctactcttgggagatccaattgtccctgctttatggtcgatccatccagctttctcagaatacaatctccttcccttcttctgtcgacgatgtgcagcgtaccacaacaggtcccaccatatatcatggcatcattgaaacagcaaggctcttacaagttttcacaaaaatctatgaactagacaaaacagtaactgcagaaaaaagtcctatatgtgcaaaaaaatgcttgatgatttgtaatgagattgaggaggtttcgagacaggcaccaaagtttttacaaatggatatttccaccaccgctctaaccaatttgttgaaggaacacccttggctatcctttacaagattcgaactgaagtggaaacagttgtctcttatcatttatgtattaagagattttttcactaattttacccagaaaaagtcacaactagaacaggatcaaaatgatcatcaaagttatgaagttaaacgatgctccatcatgttaagcgatgcagcacaaagaactgttatgtctgtaagtagctatatggacaatcataatgtcaccccatattttgcctggaattgttcttattacttgttcaatgcagtcctagtacccataaagactctactctcaaactcaaaatcgaatgctgagaataacgagaccgcacaattattacaacaaattaacactgttctgatgctattaaaaaaactggccacttttaaaatccagacttgtgaaaaatacattcaagtactggaagaggtatgtgcgccgtttctgttatcacagtgtgcaatcccattaccgcatatcagttataacaatagtaatggtagcgccattaaaaatattgtcggttctgcaactatcgcccaataccctactcttccggaggaaaatgtcaacaatatcagtgttaaatatgtttctcctggctcagtagggccttcacctgtgccattgaaatcaggagcaagtttcagtgatctagtcaagctgttatctaaccgtccaccctctcgtaactctccagtgacaataccaagaagcacaccttcgcatcgctcagtcacgccttttctagggcaacagcaacagctgcaatcattagtgccactgaccccgtctgctttgtttggtggcgccaattttaatcaaagtgggaatattgctgatagctcattgtccttcactttcactaacagtagcaacggtccgaacctcataacaactcaaacaaattctcaagcgctttcacaaccaattgcctcctctaacgttcatgataacttcatgaataatgaaatcacggctagtaaaattgatgatggtaataattcaaaaccactgtcacctggttggacggaccaaactgcgtataacgcgtttggaatcactacagggatgtttaataccactacaatggatgatgtatataactatctattcgatgatgaagataccccaccaaacccaaaaaaagagtaa

SEQ ID NO: 10950 - DNA, 2646 bp, Artificial Sequence
  Description of Artificial Sequence: Synthetic polynucleotide
atgaagttattatcttctatcgaacaagcatgcgatatttgcagacttaaaaagctcaagtgctccaaagaaaaaccgaagtgcgccaagtgtttgaagaacaactgggagtgtcgctactctcccaaaaccaaaaggtctccgttgactagggcacatttaacagaagtggaaagtaggttagaaagattagaacagttatttttattgatttttcctagagaagaccttgacatgattttgaaaatggattctttacaggatataaaagcattgttaacaggattatttgtacaagataatgtgaataaagatgccgtcacagatagattggcttctgtggagactgatatgcctttaacattgagacagcatagaataagtgcgacatcttcttctgaagagagtagtaacaaaggtcaaagacagttgactgtatctattgactctgcagctcatcatgataactccacaattccgttggattttatgcccagggatgctcttcatggatttgattggtctgaagaggatgacatgagtgatggcttgcccttcttgaaaacggaccccaacaataatgggttctttggcgacggttctctcttatgtattcttagatctattggctttaaaccggaaaattacacgaactctaacgttaacaggctcccgaccatgattacggatagatacacgttggcttctagatccacaacatcccgtttacttcaaagttatctcaataattttcacccctactgccctatcgtgcactctccgacgttgatgatgttgtataataaccagattgaaatcgcgtctaaggatcaatggcaaatcctttttaactgcatattagccattggagcctggtgtatagagggggaatctactgatatagatgttttttactatcaaaatgctaaatctcatttgacgagcaaggtcttcgagtctggttccataattttggtgacagccttgcatcttttaagtagatatacacagtggaggcagaaaacaaatactagctataattttcacagcttttccataagaatggccatatctttgggcttgaatagggacctcccctcttccttcagtgatagcagcattttggaacaaagacgcagaatttggtggtctgtctactcttgggagatccaattgtccttactttatggtagatccatccagctttctcagaatacaatctccttcccttcttctgtcgacgatgtgcagcgtaccacaacaggtcccaccatatatcatggcatcattgaaacagcaaggctcttacaagttttcacaaaaatctatgaattagacaaaacagtaactgcagaaaaaagtcctatatgtgcaaaaaaatgcttgatgatttgtaatgagattgaggaggtttctagacaggcaccaaagtttttacaaatggatatttccaccaccgctttgaccaatttgttgaaggaacacccttggttatcctttacaagattcgaattgaagtggaaacagttgtctcttatcatttatgtattaagagattttttcactaattttacccagaaaaagtctcaattggaacaggatcaaaatgatcatcaaagttatgaagttaaaagatgctccatcatgttaagcgatgcagcacaaagaactgttatgtctgtaagtagctatatggacaatcataatgtcaccccatattttgcctggaattgttcttattacttgttcaatgcagtcttggtacccataaagactttactctccaactccaaatctaatgctgagaataacgagaccgcacaattattacaacaaattaacactgttttgatgcttttaaaaaaattggccacttttaaaatccagacttgtgaaaaatacattcaagtattggaagaggtatgtgcgccgtttttattatctcagtgtgcaatcccattaccgcatatcagttataacaatagtaatggtagcgccattaaaaatattgtcggttctgcaactatcgcccaataccctactcttccggaggaaaatgtcaacaatatcagtgttaaatatgtttctcctggctctgtagggccttctcctgtgccattgaaaagtggagcaagtttcagtgatttggtcaagcttttatctaaccgtccaccctctcgtaactctccagtgacaataccaagaagcacaccttctcatcgctctgtcacgccttttttggggcaacagcaacagttacaatctttagtgccattgaccccgtctgctttgtttggtggcgccaattttaatcaaagtgggaatattgctgatagctctttgtccttcactttcactaacagtagcaacggtccgaacctcataacaactcaaacaaattctcaagcgctttctcaaccaattgcctcctctaacgttcatgataacttcatgaataatgaaatcacggctagtaaaattgatgatggtaataattctaaaccattatctcctggttggacggaccaaactgcgtataacgcgtttggaatcactacagggatgtttaataccactacaatggatgatgtatataactatcttttcgatgatgaagataccccaccaaacccaaaaaaagagtga

SEQ ID NO: 10951 - DNA, 1572 bp, Saccharomyces cerevisiae
atggatccctttcacaatggcaataaaaggagctcaatatcgtttggctcatcgcagcggcagccatataacaagaacaattacttgagtggtactaatgggccttcctcggcggcacaagatcaaggtagaggcccatctccctttggaatgtctggcaacactaccaatggcggtaacagcaaaaggaatagtggctgtgacctaagtgccacgtactatgcaagtcgatcgccgatgtattcaccgttagatttctcgccaccagttttttcaccaaatcattctcagttacagcaggcgaggggctatgctgcaaatattccggttgtaagcaatctgatgaacccttccatggcctccgtgtgcgaatatcaatcacactatccactctttgggctcgattggagcgccgacgactacgtctgcttgggttcgtacaaagaggacagcagaaataagttgcaggttctgcactctaatgatctactgagctgggaaagcgtagtggacgcagatgtggtttatcctgtgagcaaaatccaatgggtcccctctcaattgtatccaaggaaactcgcgacgtgttctgactccttacggatttggagcgttagccctgaggaaagacagttccaagaacaaataaatctatctctgtgtaaatacaatagacagcaccccgccaatcccgcggccgcagatgacatgaaggtcataggcactttcccaccaataacatcatttgactggaacacggtcgatactaacttgataatctcaagttccatcgacaccacatgcattgtatgggatctgcaaagcagtcactacgttaagacccaattgatcgctcacgacagcgaagtttttgatgtaaggtttttgacaaaatcgacccaattatttgctagttgtggtggggacggtagtgtacgagtatttgatttaagatcgcttgcgcacagtacaattatttacgagcctccctcttcctcagtgtctggagccactgcgggtactataacaccgtcgtcgaaaggttcggacgccttattgaggctggagccatcaccgtatgacccaaatgtgttggccacttttgcagctgactcgaacaaaatcattattctagatatgaggaacccagaatcccctatactaaacttacaaggccacggttcttcggtaaacgggattaaatggcatcccacaaagcgcaatgttttgctctcgtgcggagatgactgccaggtgctctattgggacttgaacagctcctttatggaaattaacgctgcaggtagcaaatcccccagtattcatggaacttccttggaggaccctgacggcgacacagagatgacagacggtggcgcaggatccggtttaaacgaggatcccttaagtttaaacaacaacagcaagcaggtgtgcaagacactagagactcctaacatgatgtatgccaataaaacacaagagataaacaacattgcatggaggccccagaggggcgattggtttgggtgcgtgagcggcaagaagtttcaaaacgtccgcgtcctttga

SEQ ID NO: 10952 - DNA, 1572 bp, Artificial Sequence
  Description of Artificial Sequence: Synthetic polynucleotide
atggatccctttcacaatggcaataaaaggagcagtatatcctttggctcctctcagagacagccatataacaagaacaattacttgagtggtactaatgggccttcctctgcggcacaagatcaaggtagaggcccatctccctttggaatgtctggcaacactaccaatggcggtaacagcaaaaggaatagtggctgtgacttgagtgccacgtactatgcaagtaggtctccgatgtattctccgttagatttctctccaccagttttttctccaaatcattctcagttacagcaggcgaggggctatgctgcaaatattccggttgtaagcaatttaatgaacccttccatggcctccgtgtgcgaatatcaatctcactatccactctttgggctcgattggagcgccgacgactacgtctgcttgggttcttacaaagaggacagcagaaataagttgcaggttttgcactctaatgatttattaagctgggaaagcgtagtggacgcagatgtggtttatcctgtgagcaaaatccaatgggtcccctctcaattgtatccaaggaaactcgcgacgtgttctgactccttaagaatttggagcgttagccctgaggaaagacagttccaagaacaaataaatttatctttatgtaaatacaatagacagcaccccgccaatcccgcggccgcagatgacatgaaggtcataggcactttcccaccaataacatcttttgactggaacacggtcgatactaacttgataatctccagttccatcgacaccacatgcattgtatgggatttgcaaagcagtcactacgttaagacccaattgatcgctcacgacagcgaagtttttgatgtaaggtttttgacaaaatctacccaattatttgctagttgtggtggggacggtagtgtaagagtatttgatttaagatctcttgcgcacagtacaattatttacgagcctccctcttcctctgtgtctggagccactgcgggtactataacaccgtcttctaaaggttctgacgccttattgaggttagagccatctccgtatgacccaaatgtgttggccacttttgcagctgactccaacaaaatcattattttagatatgaggaacccagaatcccctatattaaacttacaaggccacggttcttctgtaaacgggattaaatggcatcccacaaagcgcaatgttttgctctcttgcggagatgactgccaggtgctctattgggacttgaacagctcctttatggaaattaacgctgcaggtagcaaatcccccagtattcatggaacttccttggaggaccctgacggcgacacagagatgacagacggtggcgcaggatccggtttaaacgaggatcccttaagtttaaacaacaacagcaagcaggtgtgcaagacattagagactcctaacatgatgtatgccaataaaacacaagagataaacaacattgcatggaggccccagaggggcgattggtttgggtgcgtgagcggcaagaagtttcaaaacgtccgcgtcctttga

SEQ ID NO: 10953 - DNA, 789 bp, Saccharomyces cerevisiae
atgaattggaagtcgtacgtttttcccggtggtcatccaccagctgcgttgaccacaggccttgtggtatttctaaccgctatttacctgttaagttttatttttgccctaagggaagacctgtcgttggcgccagagtcattgttcaaactgcaaatgagcaggctatcgctttatcctttaattcacctatcattgcctcatttactgttcaatgtgctagccatctgggcacccttgaatctcttcgaagaaacgcatgggactgtgtacacaggtgtttttttgaacctgagtgctctatttgccggaattctgtactgtttgttgggtaagttgctatatccagaagcattagttgcaggcgccagtgggtggtgtttcaccttattcgcatactatagttttaaagaatcacagatccgccctagaacaaggatctttcgcacagactactcaattccgacattatatacacccctagtactattagtcgcaattgccgtcgttatacctggctccagtttctggggtcattttttcggcttatgtgtcggttacgccataggctacaaggaatcgtggtttaacaagatcactccaccaggatggatcatcaccaaaatcgaaaaaagtttagacggtttaattcgattaataccttggggaattaagtattacagagatgaggatatcgacagaactaaagattacgaaccgttaatgtccacagaaacaccattgcctctccacaatgacaactccggcactgtcctagggactgcctag

SEQ ID NO: 10954 - DNA, 789 bp, Artificial Sequence
  Description of Artificial Sequence: Synthetic polynucleotide
atgaattggaagtcctacgtttttcccggtggtcatccaccagctgcgttgaccacaggccttgtggtatttttaaccgctatttacttattaagttttatttttgccttaagggaagacctttctttggcgccagagtctttgttcaaattacaaatgagcaggctttctctttatcctttaattcacttatctttgcctcatttattattcaatgtgcttgccatctgggcacccttgaatctcttcgaagaaacgcatgggactgtgtacacaggtgtttttttgaacttgagtgctttgtttgccggaattttatactgtttgttgggtaagttgttatatccagaagcattagttgcaggcgccagtgggtggtgtttcaccttattcgcatactatagttttaaagaatctcagatccgccctagaacaaggatctttcgcacagactactctattccgacattatatacacccttagtattgttagtcgcaattgccgtcgttatacctggctccagtttctggggtcattttttcggcttatgtgtcggttacgccataggctacaaggaaagttggtttaacaagatcactccaccaggatggatcatcaccaaaatcgaaaaaagtttagacggtttaattagattaataccttggggaattaagtattacagagatgaggatatcgacagaactaaagattacgaaccgttaatgtccacagaaacaccattgcctctccacaatgacaactccggcactgtccttgggactgcctga

SEQ ID NO: 10955 - DNA, 1365 bp, Saccharomyces cerevisiae
atgcatgggcctacttcaaaagctatttcccgcaatgtgagaagcgtgaagagaccaagaagagcacctaggcccgtggtctccacgcaggctatgaacaagttgtctaacgtaacactctctgctgaacaagaaaagttgagagagcgcgttttgtcgttcatgcgttccaacttatctcagtacaagtctgactggaaacatccggccatgtttgtaatccaaggggacgcaggtacaggcaagtctgtgattctaaactccttgttcaatgaaattcagaaactatcccagttctcaccttcttctgaagatatcttacatgggacacataattatctggtagtcaaccatcccgagatgttaaagttatatatccggattagtgacagtttcaaatatatttctaaatcgtcactagaacggcccacttcgttgatcaacaatctacagaagagaaaagtcatggccgatgtagtcattgtagatgaagcacatttgttggccacttctaaggatgctttcaaaagattttatggcgaaaaccatctcaaagacttaatgtccctttgtaaagtgcttgtattggtttacgatgataagcaagctttaagaatgggttcctattgggatgaaggttctaataacggtgccactttaaaggacttttacaacgagattccaccaaaatccagagactggtacactttaaaacagcagtttagggttgctgccccacaaaacgtgttgaactggattgaccaaattagtgtcgcaggtaaaatcccaccaattgaatctgtgctatctaagggcaatgcagattgtgctgacgataaaattaagaattttgatttcaaaatttgggatgattgtggcgccatgtacgaggcaatcaaggagaaagaccgtcaatacggccaatgtaggatgctatctacttacgattttccctatcgcttggacggaaaagactattacgttgaatgtggtgacaatttcaaagttcgctgggatcgctatactccacgtgaagtgacgccttggagtgagcgttgcgacacgattgatgaggtaggtagtgtgtatactatccaagggtttgatctgaattatgctggtgtaattttgggccgttccattgggtatgatgcggctaatgactgcatcaaactaagaccagagctgtatgacgatagggccggtttcaccaaaaagaaaaacattcacaatgcagaggacgttaagcaaaagattattatgaatagcattaatgtcctcttaactcgtggcgtgcgtggtctgtatgtttatgcatacgatcctgaattaagagagagactgcttcgtccatcaaaaaaatag

SEQ ID NO: 10956 - DNA, 1365 bp, Artificial Sequence
  Description of Artificial Sequence: Synthetic polynucleotide
atgcatgggcctacttctaaagctatttcccgcaatgtgagaagcgtgaagagaccaagaagagcacctaggcccgtggtctccacgcaggctatgaacaagttgtctaacgtaacactctctgctgaacaagaaaagttgagagagcgcgttttgagtttcatgcgttccaacttatctcagtacaagtctgactggaaacatccggccatgtttgtaatccaaggggacgcaggtacaggcaagtctgtgattttgaactccttgttcaatgaaattcagaaactttcccagttcagtccttcttctgaagatatcttacatgggacacataattatttggtagtcaaccatcccgagatgttaaagttatatatcagaattagtgacagtttcaaatatatttctaaatcttctttggaaaggcccacttctttgatcaacaatttacagaagagaaaagtcatggccgatgtagtcattgtagatgaagcacatttgttggccacttctaaggatgctttcaaaagattttatggcgaaaaccatctcaaagacttaatgtccctttgtaaagtgcttgtattggtttacgatgataagcaagctttaagaatgggttcctattgggatgaaggttctaataacggtgccactttaaaggacttttacaacgagattccaccaaaatccagagactggtacactttaaaacagcagtttagggttgctgccccacaaaacgtgttgaactggattgaccaaattagtgtcgcaggtaaaatcccaccaattgaatctgtgttatctaagggcaatgcagattgtgctgacgataaaattaagaattttgatttcaaaatttgggatgattgtggcgccatgtacgaggcaatcaaggagaaagaccgtcaatacggccaatgtaggatgctttctacttacgattttccctatcgcttggacggaaaagactattacgttgaatgtggtgacaatttcaaagttcgctgggatcgctatactccacgtgaagtgacgccttggagtgagcgttgcgacacgattgatgaggtaggtagtgtgtatactatccaagggtttgatttgaattatgctggtgtaattttgggccgttccattgggtatgatgcggctaatgactgcatcaaattgagaccagagttgtatgacgatagggccggtttcaccaaaaagaaaaacattcacaatgcagaggacgttaagcaaaagattattatgaatagcattaatgtcctcttaactcgtggcgtgcgtggtttatatgtttatgcatacgatcctgaattaagagagagattacttcgtccatctaaaaaatga

SEQ ID NO: 10957 - DNA, 1020 bp, Saccharomyces cerevisiae
atggcgggaagtacatccagtttggtgatctgtgcgattggtatatatgctacttttttgacgtgggcattagtacaggagcctttggctacaagaacctggccaaactccatgggaaagtttcaattccctaatgtaatatccctcatacaagcttctgtggcaatgatgatgggctacctgtacttaaactggaagaaggtggaatatccgcccagaaaaatgattaaagatcattggaaacaattgatgttgatatcatttacacagagtagttcaggcccgctggctacaacttctttaaagcacgtggattatctcacttacatgttagcaaagtcatgcaagatgatccccgtgttgttggtgcatttgcttttgtataggacgcccatagcaagccaaaaaaaagttgtagctctcttggtaagtctcggtgtcactattttcactataggtggcaacgatggtaaaaagttgaagagatcctttaatgagagcggaaatgataacaaattacaagggtttggactacttttctctagtttattccttgatggattgaccaacgccacccaagataagctactaaaggccaataaggccaaagaaaagggaaaacaaactttgataacaggtgcacacttgatgtttacactgaacctcttcgtgatattgtggaatattttgtattttattgtgatcgactgcaaacaatgggataatgccgtttctgtattgacgatggacccacaagtgtggggctatttaatgctttattcgttctgtggcgctatgggacaatgctttattttctatactctagaacaatttggctctttagttttgatcatgataacagtcaccaggaaaatggtctcgatgattttgagtattattgtcttcggtaagagtgtacgtttccagcaatgggtggggatgtttatagtatttggtggaatcacttgggaagcactcaacaagaagaaggctaatataccgaaggcaaaatctgcgtag

SEQ ID NO: 10958 - DNA, 1020 bp, Artificial Sequence
  Description of Artificial Sequence: Synthetic polynucleotide
atggcgggaagtacatccagtttggtgatctgtgcgattggtatatatgctacttttttgacgtgggcattagtacaggagcctttggctacaagaacctggccaaactccatgggaaagtttcaattccctaatgtaatatccctcatacaagcttctgtggcaatgatgatgggctacttgtacttaaactggaagaaggtggaatatccgcccagaaaaatgattaaagatcattggaaacaattgatgttgatatcctttacacagagtagttctggcccgttagctacaacttctttaaagcacgtggattatctcacttacatgttagcaaagtcttgcaagatgatccccgtgttgttggtgcatttgcttttgtataggacgcccatagcaagccaaaaaaaagttgtagctctcttggtaagtctcggtgtcactattttcactataggtggcaacgatggtaaaaagttgaagagatcctttaatgagagcggaaatgataacaaattacaagggtttggattgcttttctctagtttattccttgatggattgaccaacgccacccaagataagttattgaaggccaataaggccaaagaaaagggaaaacaaactttgataacaggtgcacacttgatgtttacattgaacctcttcgtgatattgtggaatattttgtattttattgtgatcgactgcaaacaatgggataatgccgtttctgtattgacgatggacccacaagtgtggggctatttaatgctttattctttctgtggcgctatgggacaatgctttattttctatactttggaacaatttggctctttagttttgatcatgataacagtcaccaggaaaatggtctccatgattttgagtattattgtcttcggtaagagtgtacgtttccagcaatgggtggggatgtttatagtatttggtggaatcacttgggaagcactcaacaagaagaaggctaatataccgaaggcaaaatctgcgtga

SEQ ID NO: 10959 - DNA, 1800 bp, Saccharomyces cerevisiae
atggttgcctattctccaatcattgccacctatggtaatcgtgcagaacagtttttagaaacagactcagacttcgctaagtatcatgcgaaattgaataaaaagttgcaacacttgaggagccgttgccatttggtcaccaaggatacaaagaaatactcaagtaaaaataagtatggcgaaattaactccgaggattatgataataaaactaaattgattggtgttttgattttactacacgctgaaagggacttggcactggctgaaactttgaaattgagagctcgtcaaagaggaaagttaaagaaaagtgaagaaaaggttttatccacaagattgaagaaggcctgcaagactgctgataaattggttaacgtcactcaaaatgaacagcaatggataactcgtgcccaatatttagcgttcgctaaattggtacattcagagtacctaattaatggaaaaaggttcaagaggaaggacaatgccaaaatttcgaacaacctagccctcgttttcgccgcattggaacacttgaagaatctaagcttattagctgaagaagttgtagataacattgttaataaataccagtactctctcaagcagtacgcgggaaatttaattacaacgcccgaaataaataactttatcgtggaaagagttcaatctgatgagaacaaggacgatgagcttgtgaaattgttattagacaatggattcaatatgaaaaaaattacaacctcaactgaagatcaaaaggttaccactaacataaactggagatctttcaacgccaagataatcgatgctgaagttgctcaatttttggaacaaggtctatctatccacccaactcagattactcaatatacacagaggctatcaaaattggagaaagctttagaccgtcatgaatttttcatcgcaaaccacgacgatcaagatgacatagacgagatggttgaaaatagttctgaaaacaatcagataattttagcctacattaaatataatattcttttgacctctatatctcgtgaaagagatttgtttactcatttatggaatcaatggctgaaattaaatacttcattaccatcgaagttaaccaaatataaagaaatggaacgtattgtgaagaatttgacaaaatatttatcggacataatggagctacctggtgtgtattcagatgacgagctgctaagccaattagacttatgcaagctgtatttccagttatttctgaatacgggctgcctgagtgttttatatcagtcgaaaggcagatatatggaggcgttagctctatatgtggacgcttaccgaagattagaaaacaaattatctgaaattgaatctctagacgaaatcttacttccagcaaatcttttgtcattgaattctgtccgaagcttacaaaagagaatcgaaaacggtggtaatagtgtcattactttggcggaatacgaaaaaagaaatcatggtggcagcttagggaaatatgatttgacagtgattgaaaaattggatagtaaaaaaatactgccaacggacatacaattgaaaaatttattccctctcaagccaaaaatgctgcccattcctagtaaaccaacactttttgatttggccttcaactacataacatatgataagcaagagccctcagcttctcaagtgaaagattcagtcacagaaaccgagagcatctctcaaacaccaatttctaatgagcagacggaaggagagcctaaaaagaagcgtggtttcttgggcctatttggtcgttaa

SEQ ID NO: 10960 - DNA, 1800 bp, Artificial Sequence
  Description of Artificial Sequence: Synthetic polynucleotide
atggttgcctattctccaatcattgccacctatggtaatcgtgcagaacagtttttagaaacagacagtgacttcgctaagtatcatgcgaaattgaataaaaagttgcaacacttgaggagccgttgccatttggtcaccaaggatacaaagaaatactctagtaaaaataagtatggcgaaattaactccgaggattatgataataaaactaaattgattggtgttttgattttattacacgctgaaagggacttggcattggctgaaactttgaaattgagagctcgtcaaagaggaaagttaaagaaaagtgaagaaaaggttttatccacaagattgaagaaggcctgcaagactgctgataaattggttaacgtcactcaaaatgaacagcaatggataactcgtgcccaatatttagcgttcgctaaattggtacattctgagtacttgattaatggaaaaaggttcaagaggaaggacaatgccaaaatttccaacaacttggccctcgttttcgccgcattggaacacttgaagaatttgagcttattagctgaagaagttgtagataacattgttaataaataccagtactctctcaagcagtacgcgggaaatttaattacaacgcccgaaataaataactttatcgtggaaagagttcaatctgatgagaacaaggacgatgagcttgtgaaattgttattagacaatggattcaatatgaaaaaaattacaacctctactgaagatcaaaaggttaccactaacataaactggagatctttcaacgccaagataatcgatgctgaagttgctcaatttttggaacaaggtctttctatccacccaactcagattactcaatatacacagaggttatccaaattggagaaagctttagaccgtcatgaatttttcatcgcaaaccacgacgatcaagatgacatagacgagatggttgaaaatagttctgaaaacaatcagataattttagcctacattaaatataatattcttttgacctctatatctcgtgaaagagatttgtttactcatttatggaatcaatggttgaaattaaatacttctttaccatctaagttaaccaaatataaagaaatggaacgtattgtgaagaatttgacaaaatatttaagtgacataatggagcttcctggtgtgtattctgatgacgagttattaagccaattagacttatgcaagctttatttccagttatttttgaatacgggctgcttaagtgttttatatcagtccaaaggcagatatatggaggcgttagctttgtatgtggacgcttacagaagattagaaaacaaattatctgaaattgaatctttggacgaaatcttacttccagcaaatcttttgtctttgaattctgtccgcagcttacaaaagagaatcgaaaacggtggtaatagtgtcattactttggcggaatacgaaaaaagaaatcatggtggcagcttagggaaatatgatttgacagtgattgaaaaattggatagtaaaaaaatattgccaacggacatacaattgaaaaatttattccctctcaagccaaaaatgttgcccattcctagtaaaccaacactttttgatttggccttcaactacataacatatgataagcaagagccctctgcttctcaagtgaaagattctgtcacagaaaccgagagcatctctcaaacaccaatttctaatgagcagacggaaggagagcctaaaaagaagcgtggtttcttgggcttatttggtcgttga

SEQ ID NO: 10961 - DNA, 4488 bp, Saccharomyces cerevisiae
atgacagcatattcaggctctccttcgaaaccaggcaataataattcttatctaaatcgttatgttgaaaacctaggcaccaatgtgactccacctctgagaccgcagtcaagttccaaaatcaactcttcgttaaacatagcgtcgccaagtcatttaaagactaagacgtcagctagcaacagttctgcgacaattttgtcaaaaaaagtagaaagttccgtatcaaagctgaagccatcccttcctaacaaactcgtaggaaaatataccgtagacttaagtaattattcgaaaatagaactgaggtactatgagtttttatgcagagtatcagaagtcaaaatatggattgaagctgttattgaggaagcactaccatcagaaatagagttatgtgttggagactcacttaggaatggtgtttttttggccaagctaacccagaggataaatccagatttgacaacggttatatttcctgcaggtgataaactacaatttaaacacactcagaacattaatgccttttttggtttggtagaacatgtcggtgttccggactcttttagatttgaattgcaagatctctataacaagaagaatatccctcaggttttcgaaaccctgcatattcttatatcaatgattaataagaaatggccaggcaaaacgcccgctttaacaaatgtatcgggccaaataagttttaccaaagaagaaatcgcagcttgtaaaaaagcatggcctagaattagagacttcaagtccttaggaactaatatcaatactgcaccagcttcccctgaggaaccaaaagaaaaaagaagcggattgataaaagactttaataaatttgaaaggccgaatataccggtggaagaaattttaattaccccaagaaagaatataacagatgctaattgctccgatttttctaatacaccttcaccttataatgaagctccaaaaatgtcaaatttggatgtcgttgttgagaagaggaaattcacacccattgagccgagtcttctgggccctacaccatctttagaatatagcccaataaaaaacaaaagtctgtcgtactattctcctaccatctcgaaatacttgacatatgatacagaattttatacgagaaggagtcgtgcaagagaggaagatttgaattattaccagacgttcaaatactcaccttctcattattctcccatgagaagagaaaggatgacagaggaacaatttttagagaaggtagttcaactgcaaaatatttgtcgaggagttaatacccgttttaacctatacattcaaaaaaggttactgaacctttttgaacaggacatactaaggtttcaagcatgcctaagaggaaataaatttagagtattgtcatcaatgtatttgccaataagaagagcaaagattgacgttcctcatgtcgaggcgattcaatcgcgaattaagggaagcagaattcgatataaatacgataaattgaaatttacactctcaaggttttcgtgtactgtcgaacttttgcaagcatattgtcgttcaaaattgttgaagacaaccgttaacacaaaattaaatgatattgagatatcacattatcctctgacaaaattgcagtcttatatgcgtgcttcttatgtgagaaagaaggtgatgtccctcaatacaaagttgaacgatgagcgagaaagtattatgaagttttcggcaatcatcagaggtaacgttgtgaggtgttcagaggacgcgatattaagtgctgtacatgatgtacataaggaaaatatctcaaaattgcaaagcttgattagaggaatatttacgcgttcgtgcctagcatcaataatatattcacttggaaaagaaaactgtaatattattcaattatcagcctgtatacgcggaaacgctgtaagacataaggtacagtcactgtttgcgcccgaaaataatctcagtgaaactgtgcacgacctccagggtttggttagaggtattctagtccgctacacattagacttagtcgatgacattgtggagtataataatttagcattatttcaagcattttctagaggcgctttagtacgtgaaagcttggaccaaaagtcgagtttttacaagagaaacgtaaggtcggttattatgattcaaagctggattaggaaaagtctgcaaagatcggcatatttggaacttctagactgtccaaatccaagtctttgggctgtcaaaaaattcgttcatttgctcaatggaacagcaaccattgaagaggtccaaaaccagttggagagttgccaagcctctcttgattccgaaaatatgaagaaggaacgattactgaagagcataagacaacaactaaatattaacggagtattggataagtttggactattaaaagataaagatcatgaactcggtatttccgattctacgattccgaagtctaaatatcaaaagtatgaaaaactgttctatatgttgcaagttgatccctcttattggaaattgctgtatttgaaagagccagaatttgttgcaaagaatgtttatatgacatttggaacagtgaatcaaaggatgaacgacagagagagatcctatttcacaaggtttgtttgtgaaatgttacaaaatgcgattaatgaagcaccgagtattgaaagctttcttgacaaccgatcacaattttggcaaaccattcttcaagattttttgagaagagagtctccagaattcttctctataatagtcccagttttggattacttgtcagatccagtagtggattttgaaagtgatccatacaaaatttatcaagaaatacacggctttagctctcctcagcattgttcgcctgtggatgatgcgagtaccaagaataagttcattgacaatttaaggtgcctatggcacgcgattgaaatggtcgctgaaatttataccagaaaggttcacactattcccgttgaaatcaggtacctctgcactaaaatcttctgctacgcggcagataagaatattgaggagattgactctttaagggccatatcaagtattctagtgaacgtttttgtgtctgaatatttggtcaaccgggaatattacggatacaaagacagcaacgttcaaaaaaataaccaaaaaattgacattctaatgaaatccttggcgactgtttttgaaatcaaaaattttgatggctttttggatccattgaaccagtacgctaacgaaataaagcctcatatcaaagatgtcctttataatgtgttagtagatccagagtatgaacaagagggagatagattgatttatttggatatggtatcgccaagccccaaattggaattgttaactgaaaaggttctggaaatcagtggtaaatttgaagagtatttaaatgaatttccggaagcagatattttgcatgatattttggaaaagaacttggacaattcatcctttccaagatcaggacgtgttaccttggaattggatgcatctgcatatcgattcctcgttagtgatgacaagatgagaaaaatctacgaccaagttaaaagggcatttgtgtacatgatgcaaattgaggatgtagataccaatttgtatgacctttcaattagtacaattctacctcaagatgaaccaaattttgcaaattttctggagcaaaatcctaaaatcagggatgatccaatgatacagaagctgaaaccattgaaatacttcacactcaaaaatgttactttgaaaaaaatacatgaactagaaagtacggggactttttgctcttctgataataagttacaaaatttcttaaacgatattgcgaacactattaaaaatcccaactatgccattgattatgtaacccaggaaatttacatcacaaaggaaacactcacaaaaatttcggaaatgaaccacagcttagatatagaattatcaaggcttaaaaaacatgttgatcatacgataaaagacttccagaaagccaaggatttttcgccggtgcacaaaagtaaatttggaaattttaagaatgcagtaaaaaaagttcaaggaagagaacgttctgaattgcagggaatgaagtttaaatggaacacaaagcagttgtatgaaagaggagtgcttaaaaccatcaggggtgaaaaactagctgaactgactgtaaaagtctttggttcgagcggtcctaaattcccagatataatattcaaaatttccacatcggatggttctagattcggtattcaaatgattgacaaaagaaaagggcccgataaacgatactcggatgatgtcgattctttctcatttaaagacttgataaagactcaagttgaaccaaaaatcgagacgtggaaattattccattccaacgttgttgttaacaatagccaattactacatttgattgtcagttttttctataaaaggaacgctttgtaa

SEQ ID NO: 10962 - DNA, 4488 bp, Artificial Sequence
  Description of Artificial Sequence: Synthetic polynucleotide
atgacagcatattctggctctccttccaaaccaggcaataataattcttatttgaatcgttatgttgaaaacttgggcaccaatgtgactccacctttgagaccgcagagcagttccaaaatcaactcttctttaaacatagcgtctccaagtcatttaaagactaagacgagcgctagcaacagttctgcgacaattttgagtaaaaaagtagaaagttccgtatccaagttgaagccatcccttcctaacaaactcgtaggaaaatataccgtagacttaagtaattattctaaaatagaattgaggtactatgagtttttatgcagagtatctgaagtcaaaatatggattgaagctgttattgaggaagcattgccatctgaaatagagttatgtgttggagactctcttaggaatggtgtttttttggccaagttgacccagaggataaatccagatttgacaacggttatatttcctgcaggtgataaattacaatttaaacacactcagaacattaatgccttttttggtttggtagaacatgtcggtgttccggactcttttagatttgaattgcaagatctctataacaagaagaatatccctcaggttttcgaaaccttacatattcttatatccatgattaataagaaatggccaggcaaaacgcccgctttaacaaatgtaagtggccaaataagttttaccaaagaagaaatcgcagcttgtaaaaaagcatggcctagaattagagacttcaagtccttaggaactaatatcaatactgcaccagcttcccctgaggaaccaaaagaaaaaagaagcggattgataaaagactttaataaatttgaaaggccgaatataccggtggaagaaattttaattaccccaagaaagaatataacagatgctaattgctccgatttttctaatacaccttctccttataatgaagctccaaaaatgagtaatttggatgtcgttgttgagaagaggaaattcacacccattgagccgagtcttttgggccctacaccatctttagaatatagcccaataaaaaacaaaagtttatcttactattctcctaccatctccaaatacttgacatatgatacagaattttatacgagaaggagtcgtgcaagagaggaagatttgaattattaccagacgttcaaatactctccttctcattattctcccatgagaagagaaaggatgacagaggaacaatttttagagaaggtagttcaattacaaaatatttgtaggggagttaatacccgttttaacctttacattcaaaaaaggttattaaacctttttgaacaggacatattaaggtttcaagcatgcttgagaggaaataaatttagagtattgagttctatgtatttgccaataagaagagcaaagattgacgttcctcatgtcgaggcgattcaatctagaattaagggaagcagaattcgttataaatacgataaattgaaatttacactctccaggttttcttgtactgtcgaacttttgcaagcatattgtcgttctaaattgttgaagacaaccgttaacacaaaattaaatgatattgagatatctcattatcctttaacaaaattgcagtcttatatgcgtgcttcttatgtgagaaagaaggtgatgtccctcaatacaaagttgaacgatgagagagaaagtattatgaagttttctgcaatcatcagaggtaacgttgtgaggtgttctgaggacgcgatattaagtgctgtacatgatgtacataaggaaaatatctccaaattgcaaagcttgattagaggaatatttacgcgttcttgcttggcatctataatatattctcttggaaaagaaaactgtaatattattcaattatctgcctgtatacgcggaaacgctgtaagacataaggtacagtctttatttgcgcccgaaaataatctcagtgaaactgtgcacgacctccagggtttggttagaggtattttagtccgctacacattagacttagtcgatgacattgtggagtataataatttagcattatttcaagcattttctagaggcgctttagtacgtgaaagcttggaccaaaagagtagtttttacaagagaaacgtaaggtctgttattatgattcaaagctggattaggaaaagtttacaaagaagtgcatatttggaacttttggactgtccaaatccaagtctttgggctgtcaaaaaattcgttcatttgctcaatggaacagcaaccattgaagaggtccaaaaccagttggagagttgccaagcctctcttgattccgaaaatatgaagaaggaaagattattgaagagcataagacaacaattgaatattaacggagtattggataagtttggattattaaaagataaagatcatgaactcggtatttccgattctacgattccgaagtctaaatatcaaaagtatgaaaaattattctatatgttgcaagttgatccctcttattggaaattgttatatttgaaagagccagaatttgttgcaaagaatgtttatatgacatttggaacagtgaatcaaaggatgaacgacagagagagatcctatttcacaaggtttgtttgtgaaatgttacaaaatgcgattaatgaagcaccgagtattgaaagctttcttgacaacagatctcaattttggcaaaccattcttcaagattttttgagaagagagtctccagaattcttctctataatagtcccagttttggattacttgagtgatccagtagtggattttgaaagtgatccatacaaaatttatcaagaaatacacggctttagctctcctcagcattgttctcctgtggatgatgcgagtaccaagaataagttcattgacaatttaaggtgcctctggcacgcgattgaaatggtcgctgaaatttataccagaaaggttcacactattcccgttgaaatcaggtacctctgcactaaaatcttctgctacgcggcagataagaatattgaggagattgactctttaagggccatatctagtattttggtgaacgtttttgtgtctgaatatttggtcaacagagaatattacggatacaaagacagcaacgttcaaaaaaataaccaaaaaattgacattttgatgaaatccttggcgactgtttttgaaatcaaaaattttgatggctttttggatccattgaaccagtacgctaacgaaataaagcctcatatcaaagatgtcctttataatgtgttagtagatccagagtatgaacaagagggagatagattgatttatttggatatggtatctccaagccccaaattggaattgttaactgaaaaggttttggaaatcagtggtaaatttgaagagtatttaaatgaatttccggaagcagatattttgcatgatattttggaaaagaacttggacaattcttcctttccaagatctggacgtgttaccttggaattggatgcatctgcatatagattcctcgttagtgatgacaagatgagaaaaatctacgaccaagttaaaagggcatttgtgtacatgatgcaaattgaggatgtagataccaatttgtatgacctttctattagtacaattttacctcaagatgaaccaaattttgcaaattttttggagcaaaatcctaaaatcagggatgatccaatgatacagaagttgaaaccattgaaatacttcacactcaaaaatgttactttgaaaaaaatacatgaattggaaagtacggggactttttgctcttctgataataagttacaaaatttcttaaacgatattgcgaacactattaaaaatcccaactatgccattgattatgtaacccaggaaatttacatcacaaaggaaacactcacaaaaatttctgaaatgaaccacagcttagatatagaattatctaggcttaaaaaacatgttgatcatacgataaaagacttccagaaagccaaggatttttctccggtgcacaaaagtaaatttggaaattttaagaatgcagtaaaaaaagttcaaggaagagaacgttctgaattgcagggaatgaagtttaaatggaacacaaagcagttgtatgaaagaggagtgcttaaaaccatcaggggtgaaaaattggctgaattgactgtaaaagtctttggttccagcggtcctaaattcccagatataatattcaaaatttccacatctgatggttctagattcggtattcaaatgattgacaaaagaaaagggcccgataaaagatactctgatgatgtcgattctttctcctttaaagacttgataaagactcaagttgaaccaaaaatcgagacgtggaaattattccattccaacgttgttgttaacaatagccaattattacatttgattgtcagttttttctataaaaggaacgctttgtga

SEQ ID NO: 10963 - DNA, 807 bp, Saccharomyces cerevisiae
atggactttactgcgaagataaaggagctcgaacgagaactctcagagacgagtgactataagaccttgcagaagaagaccataagtcttcgaagtgagctgaatactctgtcacattctttgacatcttatgaaaaagaacacttctccaatgatatagaaaatgtattaaaatctattaatgcaaaattatctgagtcaaagggcaaaaaacgactattctccttcaaacagaaaaattcatcatcagccgttcataagaatgttgaacgtacggagcttgcgaatgcgccggcgtataccactactttgaaaaagcattatgtcttggagaagggtgattcagcttttgaaaatttagagttttgtactgttacatcaacaacagattatagtggcaatagtgccctttctggttctttgtgctttcgcaatattactaaatgtgtcataaacttacaaaggattttctttcaaacagggagtattttcataactgattgtacggattctataatttttctacggtctccttccgacaaggatttccaaatccgtttacgtgacttgaaaaattgcaaaattttgatagagaaactctcgccaagtatcgattgcaaacaagtggtaatcatagaaaattgtcacaaatgcattttcaacgcaagcactcgggaccacctaattatacaagatttctctaaccccttccaaagcgaagaaactgaggacaattctgcctttgcatttgaagattttgatatttgtaacaaggatacaatgcagttgtttcgcgcttacttatag

SEQ ID NO: 10964 - DNA, 807 bp, Artificial Sequence
  Description of Artificial Sequence: Synthetic polynucleotide
atggactttactgcgaagataaaggagctcgaaagagaactcagtgagacgagtgactataagaccttgcagaagaagaccataagtcttaggagtgagttgaatactttatctcattctttgacatcttatgaaaaagaacacttctccaatgatatagaaaatgtattaaaatctattaatgcaaaattatctgagtctaagggcaaaaaaagattattctccttcaaacagaaaaattcttcttctgccgttcataagaatgttgaacgtacggagcttgcgaatgcgccggcgtataccactactttgaaaaagcattatgtcttggagaagggtgattctgcttttgaaaatttagagttttgtactgttacatctacaacagattatagtggcaatagtgccctttctggttctttgtgctttcgcaatattactaaatgtgtcataaacttacaaaggattttctttcaaacagggagtattttcataactgattgtacggattctataatttttttaagatctccttccgacaaggatttccaaatccgtttacgtgacttgaaaaattgcaaaattttgatagagaaactctctccaagtatcgattgcaaacaagtggtaatcatagaaaattgtcacaaatgcattttcaacgcaagcactagagaccacttgattatacaagatttctctaaccccttccaaagcgaagaaactgaggacaattctgcctttgcatttgaagattttgatatttgtaacaaggatacaatgcagttgtttcgcgcttacttatga

SEQ ID NO: 10965 - DNA, 2130 bp, Saccharomyces cerevisiae
atggctagtgaaacttttgaatttcaagctgaaattactcagttgatgagtttgatcatcaacaccgtctattctaacaaggaaattttcttgagagaactgatatctaatgcctcggatgcgttggataaaattagatacaaatctttgtctgatccaaagcaattggaaacagaaccagatctctttattagaatcactccaaagccagagcaaaaagttttggaaatcagagattctggtattggtatgaccaaggctgaattgattaataacttgggtaccattgccaagtctggtaccaaagccttcatggaagctctatctgctggtgccgatgtatccatgattggtcaattcggtgttggtttttactctttattcttagttgccgacagagttcaggttatttcaaagagcaacgacgacgaacaatacatctgggaatccaacgctggtggttctttcactgttactctagacgaagttaatgaaagaattggtaggggtaccatcttgaggttattcttgaaagatgaccaattggagtacttggaagaaaagagaataaaggaagttatcaagagacattctgagttcgtggcctacccaatccaattagtcgtcaccaaggaagttgaaaaggaagttccaattccagaagaagaaaagaaagacgaggaaaagaaggatgaggaaaagaaggatgaagacgacaagaaaccaaaattggaagaagtcgatgaagaagaggaaaagaagccaaagacgaaaaaagttaaagaagaagttcaagagatagaagaactaaacaagactaagcctttgtggactagaaacccatctgatatcactcaagaagaatacaatgctttctataagtctatttcaaacgactgggaagacccattgtacgttaagcatttctccgttgaaggtcaattggaatttagagctatcttattcattccaaagagagcaccattcgacttgtttgagagtaaaaagaagaagaataatatcaagttgtacgttcgtcgtgttttcatcactgatgaagctgaagacttgattccagagtggttatctttcgtcaagggtgttgttgactctgaggatttaccattgaatttgtccagagaaatgttacaacaaaataagatcatgaaggttattagaaagaacattgtcaaaaagttgattgaagccttcaacgaaattgctgaagactctgaacaatttgaaaagttctactcggctttctccaaaaatatcaagttgggtgtacatgaagatacccaaaacagggctgctttggctaagttgttacgttacaactctaccaagtccgtagatgagttgacttccttaactgattacgttaccagaatgccagaacaccaaaagaacatctactacatcactggtgaatctctaaaggctgtcgaaaagtctccatttttggatgccttgaaggctaaaaacttcgaggttttgttcttgaccgacccaattgatgaatacgccttcactcaattgaaggaattcgaaggtaaaactttggttgacattactaaagatttcgaattggaagaaactgacgaagaaaaagctgaaagagagaaggagatcaaagaatatgaaccattgaccaaggccttgaaagaaattttgggtgaccaagtggagaaagttgttgtttcttacaaattgttggatgccccagctgctatcagaactggtcaatttggttggtctgctaacatggaaagaatcatgaaggctcaagccttgagagactcttccatgtcctcctacatgtcttccaagaagactttcgaaatttctccaaaatctccaattatcaaggaattgaaaaagagagttgacgaaggtggtgctcaagacaagactgtcaaggacttgactaagttattatatgaaactgctttgttgacttccggcttcagtttggacgaaccaacttcctttgcatcaagaattaacagattgatctctttgggtttgaacattgatgaggatgaagaaacagagactgctccagaagcatccaccgcagctccggttgaagaggttccagctgacaccgaaatggaagaggtagattag

SEQ ID NO: 10966 - DNA, 2130 bp, Artificial Sequence
  Description of Artificial Sequence: Synthetic polynucleotide
atggctagtgaaacttttgaatttcaagctgaaattactcagttgatgagtttgatcatcaacaccgtctattctaacaaggaaattttcttgagagaattgatatctaatgcctctgatgcgttggataaaattagatacaaatctttgtctgatccaaagcaattggaaacagaaccagatctctttattagaatcactccaaagccagagcaaaaagttttggaaatcagagattctggtattggtatgaccaaggctgaattgattaataacttgggtaccattgccaagtctggtaccaaagccttcatggaagctttatctgctggtgccgatgtatccatgattggtcaattcggtgttggtttttactctttattcttagttgccgacagagttcaggttatttccaagagcaacgacgacgaacaatacatctgggaatccaacgctggtggttctttcactgttactttggacgaagttaatgaaagaattggtaggggtaccatcttgaggttattcttgaaagatgaccaattggagtacttggaagaaaagagaataaaggaagttatcaagagacattctgagttcgtggcctacccaatccaattagtcgtcaccaaggaagttgaaaaggaagttccaattccagaagaagaaaagaaagacgaggaaaagaaggatgaggaaaagaaggatgaagacgacaagaaaccaaaattggaagaagtcgatgaagaagaggaaaagaagccaaagacgaaaaaagttaaagaagaagttcaagagatagaagaattgaacaagactaagcctttgtggactagaaacccatctgatatcactcaagaagaatacaatgctttctataagtctatttccaacgactgggaagacccattgtacgttaagcatttctccgttgaaggtcaattggaatttagagctatcttattcattccaaagagagcaccattcgacttgtttgagagtaaaaagaagaagaataatatcaagttgtacgttcgtcgtgttttcatcactgatgaagctgaagacttgattccagagtggttatctttcgtcaagggtgttgttgactctgaggatttaccattgaatttgtccagagaaatgttacaacaaaataagatcatgaaggttattagaaagaacattgtcaaaaagttgattgaagccttcaacgaaattgctgaagactctgaacaatttgaaaagttctactctgctttctccaaaaatatcaagttgggtgtacatgaagatacccaaaacagggctgctttggctaagttgttacgttacaactctaccaagtccgtagatgagttgacttccttaactgattacgttaccagaatgccagaacaccaaaagaacatctactacatcactggtgaatctttgaaggctgtcgaaaagtctccatttttggatgccttgaaggctaaaaacttcgaggttttgttcttgaccgacccaattgatgaatacgccttcactcaattgaaggaattcgaaggtaaaactttggttgacattactaaagatttcgaattggaagaaactgacgaagaaaaagctgaaagagagaaggagatcaaagaatatgaaccattgaccaaggccttgaaagaaattttgggtgaccaagtggagaaagttgttgtttcttacaaattgttggatgccccagctgctatcagaactggtcaatttggttggtctgctaacatggaaagaatcatgaaggctcaagccttgagagactcttccatgtcctcctacatgtcttccaagaagactttcgaaatttctccaaaatctccaattatcaaggaattgaaaaagagagttgacgaaggtggtgctcaagacaagactgtcaaggacttgactaagttattatatgaaactgctttgttgacttccggcttcagtttggacgaaccaacttcctttgcatctagaattaacagattgatctctttgggtttgaacattgatgaggatgaagaaacagagactgctccagaagcatccaccgcagctccggttgaagaggttccagctgacaccgaaatggaagaggtagattga

SEQ ID NO: 10967 - DNA, 603 bp, Saccharomyces cerevisiae
atgggcctacacagtgaaccgttagatcaagaggaccaagacaccataatactcgatgcaagagctggcgatttggattctctgaaagatatatttacaactttagtcagtcccgagttactttcgacttgtaaggaaagtgaatctgattctacggctttacatatggctgctgccaacggtcatatagagaccgttcggtatatactggagacggtttctcgcgcaaatagtgccgaagacttgaaagcttttgttaatgaggtgaacaaaacaggcaacacggctttacattgggcgtcgttgaatggcaaattagacgtggtcaagctactgtgtgatgaatatgaggcagacccctttattagaaacaaattcggccacgatgctatctttgaggccgagaacagcgggaaggaagaagtggaaacatactttttgaagaagtatgatgtcgaacctgaagatgatgaagaagacacacaaactgagggcaagaattcggtccaaatcacaaagggtacagaaattgaacaagtcaccaaggaagccaccgaggctttaagagaagaaaccgagaaactgaatataaataaagactaa

SEQ ID NO: 10968 - DNA, 603 bp, Artificial Sequence
  Description of Artificial Sequence: Synthetic polynucleotide
atgggcttgcacagtgaaccgttagatcaagaggaccaagacaccataatactcgatgcaagagctggcgatttggattctttgaaagatatatttacaactttagtcagtcccgagttactttctacttgtaaggaaagtgaatctgattctacggctttacatatggctgctgccaacggtcatatagagaccgttagatatatattggagacggtttctcgcgcaaatagtgccgaagacttgaaagcttttgttaatgaggtgaacaaaacaggcaacacggctttacattgggcgtctttgaatggcaaattagacgtggtcaagttattatgtgatgaatatgaggcagacccctttattagaaacaaattcggccacgatgctatctttgaggccgagaacagcgggaaggaagaagtggaaacatactttttgaagaagtatgatgtcgaacctgaagatgatgaagaagacacacaaactgagggcaagaattctgtccaaatcacaaagggtacagaaattgaacaagtcaccaaggaagccaccgaggctttaagagaagaaaccgagaaattgaatataaataaagactga

SEQ ID NO: 10969 - DNA, 858 bp, Saccharomyces cerevisiae
atgtcctccgatttagctgctgagttaggattcgaccctgcactaaagaagaaaaagaagactaagaaggtgatcccagatgattttgatgctgccgtaaacggcaaagaaaatggttcaggagatgatttatttgccggattaaaaaagaaaaagaagaagtccaagagcgtttctgccgatgctgaagctgaaaaagagcctactgacgacatagcagaagccttgggtgaactatccttgaagaagaaaaagaaaaagacaaaggacagcagtgtagacgcgtttgagaaagaactagctaaagctggtctagataatgtggatgctgaaagcaaagaaggcactccaagtgctaattccagcattcaacaagaagttggcctaccttattcagagttattatctagatttttcaatattctaagaactaacaatccagaacttgctggtgatagaagtggtccaaagttcagaattcctcctcctgtttgtttgcgtgatggtaagaagactattttctcgaatatccaagatatcgccgaaaaattgcatagatctccggaacatttgattcaatatctcttcgcagaattaggtacgtccggttctgttgacggtcagaaaagattagtcattaagggtaagtttcaatccaaacaaatggagaatgtcttaagaagatacattttggagtatgtcacttgtaaaacttgtaagagtattaacaccgaattgaagagagaacagtcaaacagactgttctttatggtctgtaaaagttgtggttctaccagatccgtctcttctattaaaaccggtttccaagctaccgttggtaagagaaggagaatgtga

SEQ ID NO: 10970 - DNA, 858 bp, Artificial Sequence
  Description of Artificial Sequence: Synthetic polynucleotide
atgtcctccgatttagctgctgagttaggattcgaccctgcattgaagaagaaaaagaagactaagaaggtgatcccagatgattttgatgctgccgtaaacggcaaagaaaatggttctggagatgatttatttgccggattaaaaaagaaaaagaagaagtccaagagcgtttctgccgatgctgaagctgaaaaagagcctactgacgacatagcagaagccttgggtgaattatccttgaagaagaaaaagaaaaagacaaaggacagcagtgtagacgcgtttgagaaagaattggctaaagctggtttggataatgtggatgctgaaagcaaagaaggcactccaagtgctaattccagcattcaacaagaagttggcttaccttattctgagttattatctagatttttcaatattttaagaactaacaatccagaacttgctggtgatagaagtggtccaaagttcagaattcctcctcctgtttgtttgcgtgatggtaagaagactattttcagtaatatccaagatatcgccgaaaaattgcatagatctccggaacatttgattcaatatctcttcgcagaattaggtacgtccggttctgttgacggtcagaaaagattagtcattaagggtaagtttcaatccaaacaaatggagaatgtcttaagaagatacattttggagtatgtcacttgtaaaacttgtaagagtattaacaccgaattgaagagagaacagtccaacagattattctttatggtctgtaaaagttgtggttctaccagatccgtctcttctattaaaaccggtttccaagctaccgttggtaagagaaggagaatgtga

SEQ ID NO: 10971 - DNA, 1095 bp, Saccharomyces cerevisiae
atgatttctattgtattggaattgttccagaacttgtgctgctgtcgcggattttccgatgctactattagggtaaatgataaacgatataggattcaacgactacttggagaaggtggaatgtcctttgtgtatttggtacaactgtcaaagaattctctgattatagacaacggcatcgcaacaccagaattatacgcactaaagaagattatttgtcctagtgtggaaagtatatccaatggtatgcgagaaattgaaaattacaaacggtttcaaagtccttatgttataaaaagtatcgactcacaagtaatgcaggaaaaagatgggtcaaaaacaatttacatagtactaccctattattcattagggagtttacaagactctattaatcggaggttactcgagggcacctttgtatcagaggcagaatgcgtaaggataatgcttggagttacaagaggtttactttgtttacatgatcctgcgtcaagacaagataacgctacttccagagtaaatgtcgatgcggtttctatgacttatagcgatgaaacggcgatgctcctagaagacacccccttagagatggacatgctttcctccaactcagcaggttcaatagcatatgcacatcgcgatattacaccttcaaacattttgttctcttcagacggtttaccagtaattggtgacctcggctcctgctctcaagctgatataacaattgaaaacagacatcaactcagcgaactacaagaatgggtcaatgacaattgtacgttgccatatactccaccagaacttctgaacttgaaattaaatcaggttttgagctctaaggttgatatttggtctttgggttgtacgttctatactttaatgttcggtatctccccctttgagcgagaagagcagatacatggagcttctttaacctacgctataaacactggtaagtacagtttcccgagaaattccagattttctgaggggcttttgagtgtaatcaagaaatgcattcaagtggatcctatacaaaggcctactaccagccaattattaaatcttttacaagatttagacacttga

SEQ ID NO: 10972 - DNA, 1095 bp, Artificial Sequence
  Description of Artificial Sequence: Synthetic polynucleotide
atgatttctattgtattggaattgttccagaacttgtgctgctgtcgcggattttccgatgctactattagggtaaatgataaaagatataggattcaaagattacttggagaaggtggaatgtcctttgtgtatttggtacaattatccaagaattctttgattatagacaacggcatcgcaacaccagaattatacgcattgaagaagattatttgtcctagtgtggaaagtatatccaatggtatgagagaaattgaaaattacaaaagatttcaaagtccttatgttataaaaagtatcgactctcaagtaatgcaggaaaaagatgggtctaaaacaatttacatagtattgccctattattctttagggagtttacaagactctattaatagaaggttactcgagggcacctttgtatctgaggcagaatgcgtaaggataatgcttggagttacaagaggtttactttgtttacatgatcctgcgtccagacaagataacgctacttccagagtaaatgtcgatgcggtttctatgacttatagcgatgaaacggcgatgctcttggaagacacccccttagagatggacatgctttcctccaactctgcaggttccatagcatatgcacatcgcgatattacaccttccaacattttgttctcttctgacggtttaccagtaattggtgacctcggctcctgctctcaagctgatataacaattgaaaacagacatcaactcagcgaattacaagaatgggtcaatgacaattgtacgttgccatatactccaccagaacttttgaacttgaaattaaatcaggttttgagctctaaggttgatatttggtctttgggttgtacgttctatactttaatgttcggtatctccccctttgagagagaagagcagatacatggagcttctttaacctacgctataaacactggtaagtacagtttcccgagaaattccagattttctgaggggcttttgagtgtaatcaagaaatgcattcaagtggatcctatacaaaggcctactaccagccaattattaaatcttttacaagatttagacacttga

SEQ ID NO: 10973 - DNA, 1416 bp, Saccharomyces cerevisiae
atgtcgattcaaactagtgatccaaatgaaacatcagatttaaagtcgttatctttaattgctgcccactcccatattacaggtttaggtctagatgaaaacttgcaaccacgtcccacatccgaaggtatggttgggcaattgcaagcccgtcgtgctgctggtgtgatattgaaaatggttcaaaatggcaccatagcaggtagggctgttttggtagcgggccccccttcaactggtaagaccgctcttgccatgggtgtttcccagtctctgggtaaagatgtaccattcactgctattgcgggctcagaaatcttttctttagaattgagtaaaactgaagcactaactcaagcttttaggaaatccatcggtatcaaaatcaaggaggagacagaattgattgaaggtgaagtcgtggaaattcaaattgatagatctattactggtggacacaaacaaggaaaattgactattaaaactaccgatatggaaacaatttatgaattaggcaataaaatgattgatggcctaactaaagaaaaggtattggctggcgatgttatttctattgataaagctagtgggaagattaccaagctaggcagatcctttgctagatctagggattatgatgccatgggtgctgataccagatttgttcaatgtccggaaggcgaactgcaaaaaaggaaaacagtggttcacacggtgtcactgcatgaaattgatgttattaattcaagaacacaaggatttttggcattatttactggtgacaccggtgaaattaggtcagaggtaagagaccagataaacacaaaagtggcagaatggaaagaagaaggtaaagcagaaattgttcctggtgtattatttatcgacgaagtccacatgttggatatagaatgtttttcctttataaatagggctttggaagatgagtttgccccaatcgtcatgatggctacaaatagaggagtttccaaaaccagagggactaattacaaatctccacatgggttacctctcgatcttttggataggtcaattattattacaactaaaagttataatgagcaggagattaagacaattttatctataagagcacaagaggaggaagttgaactgtcatccgatgccttagatctattgaccaaaacaggtgtggaaactagtttgcgttacagcagtaatttaatctctgttgctcagcaaattgcaatgaagagaaaaaacaacactgttgaagtggaagatgtcaaaagggcttatttgctatttttggacagcgctagatctgttaagtatgttcaagagaacgagtcacaatatattgatgatcagggcaacgttcaaatatccattgctaaatcagcagaccctgatgccatggatactacggaataa

SEQ ID NO: 10974 - DNA, 1416 bp, Artificial Sequence
  Description of Artificial Sequence: Synthetic polynucleotide
atgtctattcaaactagtgatccaaatgaaacatctgatttaaagtctttatctttaattgctgcccactcccatattacaggtttaggtttggatgaaaacttgcaaccacgtcccacatccgaaggtatggttgggcaattgcaagcccgtcgtgctgctggtgtgatattgaaaatggttcaaaatggcaccatagcaggtagggctgttttggtagcgggccccccttccactggtaagaccgctcttgccatgggtgtttcccagtctttgggtaaagatgtaccattcactgctattgcgggctctgaaatcttttctttagaattgagtaaaactgaagcattgactcaagcttttaggaaatccatcggtatcaaaatcaaggaggagacagaattgattgaaggtgaagtcgtggaaattcaaattgatagatctattactggtggacacaaacaaggaaaattgactattaaaactaccgatatggaaacaatttatgaattaggcaataaaatgattgatggcttaactaaagaaaaggtattggctggcgatgttatttctattgataaagctagtgggaagattaccaagttgggcagatcctttgctagatctagggattatgatgccatgggtgctgataccagatttgttcaatgtccggaaggcgaattacaaaaaaggaaaacagtggttcacacggtgtctttgcatgaaattgatgttattaattctagaacacaaggatttttggcattatttactggtgacaccggtgaaattaggagtgaggtaagagaccagataaacacaaaagtggcagaatggaaagaagaaggtaaagcagaaattgttcctggtgtattatttatcgacgaagtccacatgttggatatagaatgtttttcctttataaatagggctttggaagatgagtttgccccaatcgtcatgatggctacaaatagaggagtttccaaaaccagagggactaattacaaatctccacatgggttacctctcgatcttttggataggtctattattattacaactaaaagttataatgagcaggagattaagacaattttatctataagagcacaagaggaggaagttgaattatcttccgatgccttagatttattgaccaaaacaggtgtggaaactagtttgcgttacagcagtaatttaatctctgttgctcagcaaattgcaatgaagagaaaaaacaacactgttgaagtggaagatgtcaaaagggcttatttgttatttttggacagcgctagatctgttaagtatgttcaagagaacgagtctcaatatattgatgatcagggcaacgttcaaatatccattgctaaatctgcagaccctgatgccatggatactacggaatga

SEQ ID NO: 10975 - DNA, 495 bp, Saccharomyces cerevisiae
atgtcaacgcaactcgcaagtaacatatatgctccattgtacgctccctttttcgggttcgcaggttgtgcagctgccatggtgctttcctgtttgggagctgccattggtacagctaagtcaggtattggtatcgccggtataggtactttcaagccggaattgatcatgaagtctttgattcctgtggttatgagtggtatcttagccatttatgggcttgttgtggccgttttaattgcaggtaatttatctcctaccgaagactatactctcttcaatgggttcatgcacttgagttgtgggctctgtgtgggatttgcctgtttgagtagtggctacgccattggtatggtcggtgacgttggtgttagaaagtatatgcaccaaccaaggctttttgtcggtatcgttttgattctaattttctctgaagttttagggttatatggtatgattgtagctttgattttgaacactagaggctctgaatga

SEQ ID NO: 10976 - DNA, 495 bp, Artificial Sequence
  Description of Artificial Sequence: Synthetic polynucleotide
atgtctacgcaactcgcaagtaacatatatgctccattgtacgctccctttttcgggttcgcaggttgtgcagctgccatggtgctttcctgtttgggagctgccattggtacagctaagtctggtattggtatcgccggtataggtactttcaagccggaattgatcatgaagtctttgattcctgtggttatgagtggtatcttagccatttatgggcttgttgtggccgttttaattgcaggtaatttatctcctaccgaagactatactctcttcaatgggttcatgcacttgagttgtgggctctgtgtgggatttgcctgtttgagtagtggctacgccattggtatggtcggtgacgttggtgttagaaagtatatgcaccaaccaaggctttttgtcggtatcgttttgattttaattttctctgaagttttagggttatatggtatgattgtagctttgattttgaacactagaggctctgaatga

SEQ ID NO: 10977 - DNA, 651 bp, Saccharomyces cerevisiae
atgtcacaaggtcagtccaaaaaactggacgtaactgttgagcagcttcgaagtatataccaccagtttcatgatatcttggaagaaaaaactgatttgcatctaccgaagaaagaatacgacgatgacgctgttaggagagaggttcagatacagttacaagaatttcttttgagcgctatgacgatggcttcgaagtcactagaagttgtcaacgccgacacggtaggaaagacggtaaagcaattgatcatggaatcacaagagaagtacatggagccctttgaccttgacctgaatgagcaagttagaaagatgtaccaagagtgggaagacgaaaccgttaaggtggcccagttgaggcaaacggggcctgcaaaaatcaacgaagtttacaacaactcaaaggatgagtatttggcacaattggatgggagaatcggcgttcttcaagctagaatgatgcagcaacaatctgctgaccatgatgatagtaccgacgatgccgatgatcacatcaactgggagcacatcaagcaggattacgttgcctcactcaatgaattgtatcaaacacagcaagacctacccaaggtaagatataacgttgaaaaggtcaagcgcttaatggacttcctggaggaggattga

SEQ ID NO: 10978 - DNA, 651 bp, Artificial Sequence
  Description of Artificial Sequence: Synthetic polynucleotide
atgtctcaaggtcagtccaaaaaattagacgtaactgttgagcagcttaggagtatataccaccagtttcatgatatcttggaagaaaaaactgatttgcatttaccgaagaaagaatacgacgatgacgctgttaggagagaggttcagatacagttacaagaatttcttttgagcgctatgacgatggcttccaagtctttggaagttgtcaacgccgacacggtaggaaagacggtaaagcaattgatcatggaatctcaagagaagtacatggagccctttgaccttgacttgaatgagcaagttagaaagatgtaccaagagtgggaagacgaaaccgttaaggtggcccagttgaggcaaacggggcctgcaaaaatcaacgaagtttacaacaactccaaggatgagtatttggcacaattggatgggagaatcggcgttcttcaagctagaatgatgcagcaacaatctgctgaccatgatgatagtaccgacgatgccgatgatcacatcaactgggagcacatcaagcaggattacgttgccagcctcaatgaattgtatcaaacacagcaagacttgcccaaggtaagatataacgttgaaaaggtcaagcgcttaatggacttcttggaggaggattga

SEQ ID NO: 10979 - DNA, 873 bp, Saccharomyces cerevisiae
atgagttataataatccgtaccagttggaaaccccttttgaagagtcatacgagttggacgaaggttcgagcgctatcggtgctgaaggccacgatttcgtgggcttcatgaataagatcagtcaaatcaatcgcgatctcgataagtacgaccataccatcaaccaggtcgattctttgcataagaggctactgaccgaagttaatgaggagcaagcaagtcacttaaggcactccctggacaacttcgtcgcacaagccacggacttgcagttcaaactgaaaaatgagattaaaagtgcccaaagggatgggatacatgacaccaacaagcaagctcaggcggaaaactccagacaaagatttttgaagcttatccaggactacagaattgtggattccaactacaaggaggagaataaagagcaagccaagaggcagtatatgatcattcaaccagaggccaccgaagatgaagttgaagcagccataagcgatgtagggggccagcagatcttctcacaagcattgttgaatgctaacagacgtggggaagccaagactgctcttgcggaagtccaggcaaggcaccaagagttattgaaactagaaaaatccatggcagaacttactcaattgtttaatgacatggaagaactggtaatagaacaacaagaaaacgtagacgtcatcgacaagaacgttgaagacgctcaactcgacgtagaacagggtgtcggtcataccgataaagccgtcaagagtgccagaaaagcaagaaagaacaagattagatgttggttgattgtattcgccatcattgtagtcgttgttgttgtcgttgttgtcccagccgttgtcaaaacgcgttaa

SEQ ID NO: 10980 - DNA, 873 bp, Artificial Sequence
  Description of Artificial Sequence: Synthetic polynucleotide
atgagttataataatccgtaccagttggaaaccccttttgaagagagttacgagttggacgaaggttccagcgctatcggtgctgaaggccacgatttcgtgggcttcatgaataagatcagtcaaatcaatcgcgatctcgataagtacgaccataccatcaaccaggtcgattctttgcataagaggttattaaccgaagttaatgaggagcaagcaagtcacttaaggcactccttggacaacttcgtcgcacaagccacggacttgcagttcaaattgaaaaatgagattaaaagtgcccaaagggatgggatacatgacaccaacaagcaagctcaggcggaaaactccagacaaagatttttgaagcttatccaggactacagaattgtggattccaactacaaggaggagaataaagagcaagccaagaggcagtatatgatcattcaaccagaggccaccgaagatgaagttgaagcagccataagcgatgtagggggccagcagatcttctctcaagcattgttgaatgctaacagacgtggggaagccaagactgctcttgcggaagtccaggcaaggcaccaagagttattgaaattagaaaaatccatggcagaacttactcaattgtttaatgacatggaagaattggtaatagaacaacaagaaaacgtagacgtcatcgacaagaacgttgaagacgctcaactcgacgtagaacagggtgtcggtcataccgataaagccgtcaagagtgccagaaaagcaagaaagaacaagattagatgttggttgattgtattcgccatcattgtagtcgttgttgttgtcgttgttgtcccagccgttgtcaaaacgcgttga

SEQ ID NO: 10981 - DNA, 5664 bp, Saccharomyces cerevisiae
atgaagccggaagttgagcaagaattagctcatattttgctaactgaattgttagcttatcaatttgcctctcctgtgagatggattgaaactcaagatgtttttttgaaggattttaacactgaaagggttgttgaaatcggtccttctccaactttggctgggatggctcaaagaaccttgaagaataaatacgaatcttacgatgctgctctgtctttacatagagaaatcttatgctattcgaaggatgccaaagagatttattataccccagatccatccgaactagctgcaaaggaagagcccgctaaggaagaagctcctgctccaactccagctgctagtgctcctgctcctgcagcagcagccccagctcccgtcgcggcagcagccccagctgcagcagctgctgagattgccgatgaacctgtcaaggcttccctattgttgcacgttttggttgctcacaagttgaagaagtcgttagattccattccaatgtccaagacaatcaaagacttggtcggtggtaaatctacagtccaaaatgaaattttgggtgatttaggtaaagaatttggtactactcctgaaaaaccagaagaaactccattagaagaattggcagaaactttccaagataccttctctggagcattgggtaagcaatcttcctcgttattatcaagattaatctcatctaagatgcctggtgggtttactattactgtcgctagaaaatacttacaaactcgctggggactaccatctggtagacaagatggtgtccttttggtagctttatctaacgagcctgctgctcgtctaggttctgaagctgatgccaaggctttcttggactccatggctcaaaaatacgcttccattgttggtgttgacttatcatcagctgctagcgctagtggtgctgccggtgcaggtgctgctgccggtgcagctatgatcgatgctggcgctctggaagaaataaccaaagaccacaaggttttggcgcgtcaacaactgcaagtattggctcgttatctaaaaatggacttggataacggtgaaagaaagttcttgaaagaaaaggacactgttgctgaacttcaagctcagttggattacttgaatgccgaattaggtgaattctttgttaacggtgttgctacttctttctctagaaaaaaggccagaaccttcgattcttcctggaactgggctaaacaatctttattatcattatactttgagataattcatggtgtcttgaaaaacgttgatagagaggttgttagtgaagctatcaatatcatgaacagatctaacgatgctttgattaaattcatggaataccatatctctaacactgatgaaacaaaaggtgaaaactatcaattggttaaaactcttggtgagcagttgattgaaaactgtaaacaagttttggatgttgatccagtttacaaagatgttgctaagcctaccggtccaaaaactgctattgacaagaacggtaacattacatactcagaagagccaagagaaaaggttaggaaattatctcaatacgtacaagaaatggcccttggtggtccaatcaccaaagaatctcaacctactattgaagaggatttgactcgtgtttacaaggcaatcagtgctcaagctgataaacaagatatttccagctccaccagggttgaatttgaaaaactatatagtgatttgatgaagttcttggaaagctccaaagaaatcgatccttctcaaacaacccaattggccggtatggatgttgaggatgctttggacaaagattccaccaaagaagttgcttctttgccaaacaaatctaccatttctaagacggtatcttcaactattccaagagaaactattccgttcttacatttgagaaagaagactcctgccggagattggaaatatgaccgccaattgtcttctcttttcttagatggtttagaaaaggctgccttcaacggtgtcaccttcaaggacaaatacgtcttgatcactggtgctggtaagggttctattggtgctgaagtcttgcaaggtttgttacaaggtggtgctaaggttgttgttaccacctctcgtttctctaagcaagttacagactactaccaatccatttacgccaaatatggtgctaagggttctactttgattgttgttccattcaaccaaggttctaagcaagacgttgaagctttgattgaatttatctacgacactgaaaagaatggtggtttaggttgggatctagatgctattattccattcgcggccattccagaacaaggtattgaattagaacatattgattctaagtctgaatttgctcatagaatcatgttgaccaatatcttaagaatgatgggttgtgtcaagaagcaaaaatctgcaagaggtattgaaacaagaccagctcaagtcattctaccaatgtctccaaaccatggtactttcggtggtgatggtatgtattcagaatccaagttgtctttggaaactttgttcaacagatggcactctgaatcctgggccaatcaattaaccgtttgcggtgctattattggttggactagaggtactggtttaatgagcgctaataacatcattgctgaaggcattgaaaagatgggtgttcgtactttctctcaaaaggaaatggctttcaacttattgggtctattgactccagaagtcgtagaattgtgccaaaaatcacctgttatggctgacttgaatggtggtttgcaatttgttcctgaattgaaggaattcactgctaaattgcgtaaagagttggttgaaacttctgaagttagaaaggcagtttccatcgaaactgctttggagcataaggttgtcaatggcaatagcgctgatgctgcatatgctcaagtcgaaattcaaccaagagctaacattcaactggacttcccagaattgaaaccatacaaacaggttaaacaaattgctcccgctgagcttgaaggtttgttggatttggaaagagttattgtagttaccggttttgctgaagtcggcccatggggttcggccagaacaagatgggaaatggaagcttttggtgaattttcgttggaaggttgcgttgaaatggcctggattatgggcttcatttcataccataacggtaatttgaagggtcgtccatacactggttgggttgattccaaaacaaaagaaccagttgatgacaaggacgttaaggccaagtatgaaacatcaatcctagaacacagtggtatcagattgatcgaaccagagttattcaatggttacaacccagaaaagaaggaaatgattcaagaagtcattgtcgaagaagacttggaaccatttgaggcttcgaaggaaactgccgaacaatttaaacaccaacatggtgacaaagtggatatcttcgaaatcccagaaacaggagagtactctgttaagttactaaagggtgccactttatacattccaaaggctttgagatttgaccgtttggttgcaggtcaaattccaactggttggaatgctaagacttatggtatctctgatgatatcatttctcaggttgacccaatcacattattcgttttggtctctgttgtggaagcatttattgcatctggtatcaccgacccatacgaaatgtacaaatacgtacatgtttctgaggttggtaactgttctggttctggtatgggtggtgtttctgccttacgtggtatgtttaaggaccgtttcaaggatgagcctgtccaaaatgatattttacaagaatcatttatcaacaccatgtccgcttgggttaatatgttgttgatttcctcatctggtccaatcaagacacctgttggtgcctgtgccacatccgtggaatctgttgacattggtgtagaaaccatcttgtctggtaaggctagaatctgtattgtcggtggttacgatgatttccaagaagaaggctcctttgagttcggtaacatgaaggccacttccaacactttggaagaatttgaacatggtcgtaccccagcggaaatgtccagacctgccaccactacccgtaacggttttatggaagctcaaggtgctggtattcaaatcatcatgcaagctgatttagctttgaagatgggtgtgccaatttacggtattgttgccatggctgctaccgccaccgataagattggtagatctgtgccagctccaggtaagggtattttaaccactgctcgtgaacaccactccagtgttaagtatgcttcaccaaacttgaacatgaagtacagaaagcgccaattggttactcgtgaagctcagattaaagattgggtagaaaacgaattggaagctttgaagttggaggccgaagaaattccaagcgaagaccaaaacgagttcttacttgaacgtaccagagaaatccacaacgaagctgaaagtcaattgagagctgcacaacaacaatggggtaacgacttctacaagagggacccacgtattgctccattgagaggagcactggctacttacggtttaactattgatgacttgggtgtcgcttcattccacggtacatccacaaaggctaatgacaagaacgaatctgccacaattaatgaaatgatgaagcatttgggtagatctgaaggtaatcccgtcattggtgttttccaaaagttcttgactggtcatccaaagggtgctgctggtgcatggatgatgaatggtgctttgcaaattctaaacagtggtattattccaggtaaccgtaacgctgataacgtggataagatcttggagcaatttgaatacgtcttgtacccatccaagactttaaagaccgacggtgtcagagccgtgtccatcacttctttcggttttggtcaaaagggtggtcaagctattgtggttcatccagactacttatacggtgctatcactgaagacagatacaacgagtatgtcgccaaggttagtgccagagagaaaagtgcctacaaattcttccataatggtatgatctacaacaagttgttcgtaagtaaagagcatgctccatacactgatgaattggaagaggatgtttacttggacccattagcccgtgtatctaaggataagaaatcaggctccttgactttcaactctaaaaacatccaaagcaaggacagttacatcaatgctaacaccattgaaactgccaagatgattgaaaacatgaccaaggagaaagtctctaacggtggcgtcggtgtagatgttgaattaatcactagcatcaacgttgaaaatgatacttttatcgagcgcaatttcaccccgcaagaaatagagtactgcagcgcgcagcctagtgtgcaaagctctttcgctgggacatggtccgccaaagaggctgttttcaagtccttaggcgtcaagtccttaggcggtggtgctgcattgaaagacatcgaaatcgtacgcgttaacaaaaacgctccagccgttgaactgcacggtaacgccaaaaaggctgccgaagaagctggtgttaccgatgtgaaggtatctatttctcacgatgacctccaagctgtcgcggtcgccgtttctactaagaaatag

SEQ ID NO: 10982 - DNA, 5664 bp, Artificial Sequence
  Description of Artificial Sequence: Synthetic polynucleotide
atgaagccggaagttgagcaagaattagctcatattttgttgactgaattgttagcttatcaatttgcctctcctgtgagatggattgaaactcaagatgtttttttgaaggattttaacactgaaagggttgttgaaatcggtccttctccaactttggctgggatggctcaaagaaccttgaagaataaatacgaatcttacgatgctgctttatctttacatagagaaatcttatgctattccaaggatgccaaagagatttattataccccagatccatccgaattggctgcaaaggaagagcccgctaaggaagaagctcctgctccaactccagctgctagtgctcctgctcctgcagcagcagccccagctcccgtcgcggcagcagccccagctgcagcagctgctgagattgccgatgaacctgtcaaggcttccttattgttgcacgttttggttgctcacaagttgaagaagtctttagattccattccaatgtccaagacaatcaaagacttggtcggtggtaaatctacagtccaaaatgaaattttgggtgatttaggtaaagaatttggtactactcctgaaaaaccagaagaaactccattagaagaattggcagaaactttccaagataccttctctggagcattgggtaagcaatcttcctctttattatctagattaatctcttctaagatgcctggtgggtttactattactgtcgctagaaaatacttacaaactcgctggggattaccatctggtagacaagatggtgtccttttggtagctttatctaacgagcctgctgctcgtttgggttctgaagctgatgccaaggctttcttggactccatggctcaaaaatacgcttccattgttggtgttgacttatcttctgctgctagcgctagtggtgctgccggtgcaggtgctgctgccggtgcagctatgatcgatgctggcgctttggaagaaataaccaaagaccacaaggttttggcgcgtcaacaattacaagtattggctcgttatttgaaaatggacttggataacggtgaaagaaagttcttgaaagaaaaggacactgttgctgaacttcaagctcagttggattacttgaatgccgaattaggtgaattctttgttaacggtgttgctacttctttctctagaaaaaaggccagaaccttcgattcttcctggaactgggctaaacaatctttattatctttatactttgagataattcatggtgtcttgaaaaacgttgatagagaggttgttagtgaagctatcaatatcatgaacagatctaacgatgctttgattaaattcatggaataccatatctctaacactgatgaaacaaaaggtgaaaactatcaattggttaaaactcttggtgagcagttgattgaaaactgtaaacaagttttggatgttgatccagtttacaaagatgttgctaagcctaccggtccaaaaactgctattgacaagaacggtaacattacatactctgaagagccaagagaaaaggttaggaaattatctcaatacgtacaagaaatggcccttggtggtccaatcaccaaagaatctcaacctactattgaagaggatttgactcgtgtttacaaggcaatcagtgctcaagctgataaacaagatatttccagctccaccagggttgaatttgaaaaactttatagtgatttgatgaagttcttggaaagctccaaagaaatcgatccttctcaaacaacccaattggccggtatggatgttgaggatgctttggacaaagattccaccaaagaagttgcttctttgccaaacaaatctaccatttctaagacggtatcttctactattccaagagaaactattccgttcttacatttgagaaagaagactcctgccggagattggaaatatgaccgccaattgtcttctcttttcttagatggtttagaaaaggctgccttcaacggtgtcaccttcaaggacaaatacgtcttgatcactggtgctggtaagggttctattggtgctgaagtcttgcaaggtttgttacaaggtggtgctaaggttgttgttaccacctctcgtttctctaagcaagttacagactactaccaatccatttacgccaaatatggtgctaagggttctactttgattgttgttccattcaaccaaggttctaagcaagacgttgaagctttgattgaatttatctacgacactgaaaagaatggtggtttaggttgggatttggatgctattattccattcgcggccattccagaacaaggtattgaattagaacatattgattctaagtctgaatttgctcatagaatcatgttgaccaatatcttaagaatgatgggttgtgtcaagaagcaaaaatctgcaagaggtattgaaacaagaccagctcaagtcattttaccaatgtctccaaaccatggtactttcggtggtgatggtatgtattctgaatccaagttgtctttggaaactttgttcaacagatggcactctgaatcctgggccaatcaattaaccgtttgcggtgctattattggttggactagaggtactggtttaatgagcgctaataacatcattgctgaaggcattgaaaagatgggtgttcgtactttctctcaaaaggaaatggctttcaacttattgggtttattgactccagaagtcgtagaattgtgccaaaaatctcctgttatggctgacttgaatggtggtttgcaatttgttcctgaattgaaggaattcactgctaaattgcgtaaagagttggttgaaacttctgaagttagaaaggcagtttccatcgaaactgctttggagcataaggttgtcaatggcaatagcgctgatgctgcatatgctcaagtcgaaattcaaccaagagctaacattcaattggacttcccagaattgaaaccatacaaacaggttaaacaaattgctcccgctgagcttgaaggtttgttggatttggaaagagttattgtagttaccggttttgctgaagtcggcccatggggttctgccagaacaagatgggaaatggaagcttttggtgaattttctttggaaggttgcgttgaaatggcctggattatgggcttcatttcttaccataacggtaatttgaagggtcgtccatacactggttgggttgattccaaaacaaaagaaccagttgatgacaaggacgttaaggccaagtatgaaacatctatcttggaacacagtggtatcagattgatcgaaccagagttattcaatggttacaacccagaaaagaaggaaatgattcaagaagtcattgtcgaagaagacttggaaccatttgaggcttccaaggaaactgccgaacaatttaaacaccaacatggtgacaaagtggatatcttcgaaatcccagaaacaggagagtactctgttaagttattgaagggtgccactttatacattccaaaggctttgagatttgaccgtttggttgcaggtcaaattccaactggttggaatgctaagacttatggtatctctgatgatatcatttctcaggttgacccaatcacattattcgttttggtctctgttgtggaagcatttattgcatctggtatcaccgacccatacgaaatgtacaaatacgtacatgtttctgaggttggtaactgttctggttctggtatgggtggtgtttctgccttacgtggtatgtttaaggaccgtttcaaggatgagcctgtccaaaatgatattttacaagaaagttttatcaacaccatgtccgcttgggttaatatgttgttgatttcctcttctggtccaatcaagacacctgttggtgcctgtgccacatccgtggaatctgttgacattggtgtagaaaccatcttgtctggtaaggctagaatctgtattgtcggtggttacgatgatttccaagaagaaggctcctttgagttcggtaacatgaaggccacttccaacactttggaagaatttgaacatggtcgtaccccagcggaaatgtccagacctgccaccactacccgtaacggttttatggaagctcaaggtgctggtattcaaatcatcatgcaagctgatttagctttgaagatgggtgtgccaatttacggtattgttgccatggctgctaccgccaccgataagattggtagatctgtgccagctccaggtaagggtattttaaccactgctcgtgaacaccactccagtgttaagtatgcttctccaaacttgaacatgaagtacagaaagcgccaattggttactcgtgaagctcagattaaagattgggtagaaaacgaattggaagctttgaagttggaggccgaagaaattccaagcgaagaccaaaacgagttcttacttgaacgtaccagagaaatccacaacgaagctgaaagtcaattgagagctgcacaacaacaatggggtaacgacttctacaagagggacccacgtattgctccattgagaggagcattggctacttacggtttaactattgatgacttgggtgtcgcttctttccacggtacatccacaaaggctaatgacaagaacgaatctgccacaattaatgaaatgatgaagcatttgggtagatctgaaggtaatcccgtcattggtgttttccaaaagttcttgactggtcatccaaagggtgctgctggtgcatggatgatgaatggtgctttgcaaattttgaacagtggtattattccaggtaaccgtaacgctgataacgtggataagatcttggagcaatttgaatacgtcttgtacccatccaagactttaaagaccgacggtgtcagagccgtgtccatcacttctttcggttttggtcaaaagggtggtcaagctattgtggttcatccagactacttatacggtgctatcactgaagacagatacaacgagtatgtcgccaaggttagtgccagagagaaaagtgcctacaaattcttccataatggtatgatctacaacaagttgttcgtaagtaaagagcatgctccatacactgatgaattggaagaggatgtttacttggacccattagcccgtgtatctaaggataagaaatctggctccttgactttcaactctaaaaacatccaaagcaaggacagttacatcaatgctaacaccattgaaactgccaagatgattgaaaacatgaccaaggagaaagtctctaacggtggcgtcggtgtagatgttgaattaatcactagcatcaacgttgaaaatgatacttttatcgagcgcaatttcaccccgcaagaaatagagtactgcagcgcgcagcctagtgtgcaaagctctttcgctgggacatggtccgccaaagaggctgttttcaagtccttaggcgtcaagtccttaggcggtggtgctgcattgaaagacatcgaaatcgtacgcgttaacaaaaacgctccagccgttgaattgcacggtaacgccaaaaaggctgccgaagaagctggtgttaccgatgtgaaggtatctatttctcacgatgacctccaagctgtcgcggtcgccgtttctactaagaaatga

SEQ ID NO: 10983 - DNA, 1176 bp, Saccharomyces cerevisiae
atggaaaataccacgaatcgtaatactgcaggcgttcttacgagcagcaatggtaactttgccaccaatagtgtagcggcatcaactccgaagaggtccaaaagtgctcgaaggaaaacgttcaaatgcaccggatatgacggttgtacgatgtccttcactagagcggaacatcttgcacgtcatataagaaagcacactggtgaaaagccgttccagtgtcctgcatgtttgaaattcttcagtagagttgataatttgaaacagcatcgggaatcggtccatgcacataaaaaccaccattctaccagctcgcaccagcgtaagccttcctcttcatctttatcctcctcttcttctgcatcttcttcgtcttctgcttcatcatctacatcatatagtgatccttacaggaaaactaatattaatagcgggaacatgccgatgatggcagaaaacgaaaaagcgccccaaataatacattcttcgccggagttcattactagcacgagaagcatcccacccatctctccaaggtccatttataatacccaacgacagcaacaacaccaacaacaacagcatcaacaggctccctattattttccttcccatccaatcactgatagttactaccagtatcctcttcccagtaataataacaccatcaattatttaccatcagtagatgtgcagtatcctttgaatgtgagcccctcctcaacgagccatccggcctctgaggtaatcatatcgtcctttcctccgaggtccatgccaagtacttccttcaaatataaagattctgccgactttcaagcacggacaactatgaacaaatacaatattagaccaagcaatatcaatgtcaatactagtaatatcaataaccatcttgattcattctccccgccgttttctccgtcaacgacagttgctgaagcaaaaccaattattttaccacagtatcagcaggcatttagccaaccaccaaatggaaataaaaacaataatatgtcttcctcgaagaatggcggcaaagggggagaaaatttcaagaatactgatgatcgcaatgataataataacaaaaagaggtcggaaactttatcagagtctgatatttcggtcaacaccaataagaaaaggcttagtgttgattacatattgacttga

SEQ ID NO: 10984 - DNA, 1176 bp, Artificial Sequence
  Description of Artificial Sequence: Synthetic polynucleotide
atggaaaataccacgaatcgtaatactgcaggcgttcttacgagcagcaatggtaactttgccaccaatagtgtagcggcatctactccgaagaggtccaaaagtgctagaaggaaaacgttcaaatgcaccggatatgacggttgtacgatgtccttcactagagcggaacatcttgcacgtcatataagaaagcacactggtgaaaagccgttccagtgtcctgcatgtttgaaattcttcagtagagttgataatttgaaacagcatagagaatctgtccatgcacataaaaaccaccattctaccagctctcaccagcgtaagccttcctcttcttctttatcctcctcttcttctgcatcttcttcttcttctgcttcttcttctacatcttatagtgatccttacaggaaaactaatattaatagcgggaacatgccgatgatggcagaaaacgaaaaagcgccccaaataatacattcttctccggagttcattactagcacgagaagcatcccacccatctctccaaggtccatttataatacccaaagacagcaacaacaccaacaacaacagcatcaacaggctccctattattttccttcccatccaatcactgatagttactaccagtatcctcttcccagtaataataacaccatcaattatttaccatctgtagatgtgcagtatcctttgaatgtgagcccctcctctacgagccatccggcctctgaggtaatcatatcttcctttcctccgaggtccatgccaagtacttccttcaaatataaagattctgccgactttcaagcaagaacaactatgaacaaatacaatattagaccaagcaatatcaatgtcaatactagtaatatcaataaccatcttgattctttctccccgccgttttctccgtccacgacagttgctgaagcaaaaccaattattttaccacagtatcagcaggcatttagccaaccaccaaatggaaataaaaacaataatatgtcttcctccaagaatggcggcaaagggggagaaaatttcaagaatactgatgatcgcaatgataataataacaaaaagaggtctgaaactttatctgagtctgatatttctgtcaacaccaataagaaaaggcttagtgttgattacatattgacttga

SEQ ID NO: 10985 - DNA, 621 bp, Saccharomyces cerevisiae
atgatgccctacaacacccctccaaatatccaagaacctatgaacttcgcaagcagcaacccctttggtattattccagatgcgctcagtttccagaatttcaaatatgatcgtcttcagcagcagcaacagcagcagcaacagcagcaacaaaatcgcactgcgtcatcgttacagcagccgcaacagcaacaaccaataagcccgcctttgtttttagtaggggccggtaccagcgaaaactcaaaccttaacaagaatgccaacactagtactatccctcctttactctttagcagatcgtctcagcattatgttgtcccagatatagaccactcctccataatatacaagaacaacatctgcaaatctttcaaagatgacttatttttctgtccaagatctttactttctctcgaagaacaacaagcatgcgagaaaatggataggctgaccgctgaacaaatgtcattgtatcatcagaacacgcaatccagttctaatcctggttctatgtcttcttcacctccaaattctgcttcttctatattcaactctaggccgaagttcaatccttatacatctcaaagttttaatcctttggaaagtgttcaagaatga

SEQ ID NO: 10986 - DNA, 621 bp, Artificial Sequence
  Description of Artificial Sequence: Synthetic polynucleotide
atgatgccctacaacacccctccaaatatccaagaacctatgaacttcgcaagcagcaacccctttggtattattccagatgcgctcagtttccagaatttcaaatatgatcgtcttcagcagcagcaacagcagcagcaacagcagcaacaaaatcgcactgcgtcttctttacagcagccgcaacagcaacaaccaataagcccgcctttgtttttagtaggggccggtaccagcgaaaactccaaccttaacaagaatgccaacactagtactatccctcctttactctttagcagatcttctcagcattatgttgtcccagatatagaccactcctccataatatacaagaacaacatctgcaaatctttcaaagatgacttatttttctgtccaagatctttactttctctcgaagaacaacaagcatgcgagaaaatggataggttgaccgctgaacaaatgtctttgtatcatcagaacacgcaatccagttctaatcctggttctatgtcttcttctcctccaaattctgcttcttctatattcaactctaggccgaagttcaatccttatacatctcaaagttttaatcctttggaaagtgttcaagaatga

SEQ ID NO: 10987 - DNA, 1650 bp, Saccharomyces cerevisiae
atgagttacactgacaaccctcctcaaacaaaaagagctttatcgttagacgatctggtgaatcacgatgaaaatgaaaaggttaaattacaaaaattaagtgaggcggctaatggcagcagaccttttgccgaaaatttagaatctgatataaatcaaacggaaacgggccaagctgctccgattgacaattacaaggagagtactggtcatggctcgcactcacaaaaacctaaatcacgcaagtcatctaatgatgatgaagaaaccgatacggatgacgaaatgggtgcaagtggagaaattaattttgattcagaaatggactttgactatgataaacaacatagaaatttactatccaacggatcacctcctatgaatgatggtagtgatgccaatgcgaagttagaaaagccttctgatgattcaattcatcagaatagcaagagtgatgaagaacagagaataccgaaacaaggtaatgaagggaacattgccagcaactatataacccaagtacctctgcaaaagcagaagcaaactgagaagaagatagcgggaaatgcagtaggaagcgtggtcaagaaggaagaagaagcgaatgcagctgtagataatatttttgaagagaaagctactttacaatcaaaaaagaataatatcaagagagatttggaggttctgaatgaaatatctgcgtcttccaagcccagtaagtacaggaatgttccaatttgggcacaaaaatggaaacctactatcaaagctcttcaaagtataaatgtgaaagatctcaaaattgacccatcttttttaaacattattcccgatgatgacttaacaaagtcagtacaggactgggtttatgctacaatatactcaattgctcctgaactaagatccttcattgagttagaaatgaaatttggtgttattattgatgcgaaaggcccagatcgtgtaaatccaccagtttcttcacaatgtgttttcactgagcttgatgcccatctaacgcctaatattgatgcatctttgttcaaagagttgagcaaatatattcgtggtattagcgaagtcactgaaaatacaggtaaattcagtattattgaatcccagacaagagattccgtctatagagtcggactatccacgcaaagaccaaggtttttgagaatgagtacagatattaagactgggagggtaggacaatttatagagaaaagacatgtagcccaactactattatattcaccaaaagatagttacgacgttaaaatctccctaaacttggaattacctgtacctgacaacgatccgccagaaaaatataaatctcaaagcccaattagtgaaaggacgaaagaccgtgttagttacattcataatgattcctgtaccagaattgatattacaaaagtcgaaaatcataaccaaaattcaaaaagtagacaatcagagaccactcacgaagtggaactagaaatcaacacgcctgcactgttaaacgcctttgataacataacgaacgatagtaaagaatatgcatctcttattagaacgtttctgaataatggtacaattattagaagaaagttatcgtctttatcatatgaaatttttgaaggttcaaagaaagtcatgtaa

SEQ ID NO: 10988 - DNA, 1650 bp, Artificial Sequence
  Description of Artificial Sequence: Synthetic polynucleotide
atgagttacactgacaaccctcctcaaacaaaaagagctttatctttagacgatttggtgaatcacgatgaaaatgaaaaggttaaattacaaaaattaagtgaggcggctaatggcagcagaccttttgccgaaaatttagaatctgatataaatcaaacggaaacgggccaagctgctccgattgacaattacaaggagagtactggtcatggctctcactctcaaaaacctaaaagccgcaagtcttctaatgatgatgaagaaaccgatacggatgacgaaatgggtgcaagtggagaaattaattttgattctgaaatggactttgactatgataaacaacatagaaatttattatccaacggatctcctcctatgaatgatggtagtgatgccaatgcgaagttagaaaagccttctgatgattctattcatcagaatagcaagagtgatgaagaacagagaataccgaaacaaggtaatgaagggaacattgccagcaactatataacccaagtacctttacaaaagcagaagcaaactgagaagaagatagcgggaaatgcagtaggaagcgtggtcaagaaggaagaagaagcgaatgcagctgtagataatatttttgaagagaaagctactttacaaagtaaaaagaataatatcaagagagatttggaggttttgaatgaaatatctgcgtcttccaagcccagtaagtacaggaatgttccaatttgggcacaaaaatggaaacctactatcaaagctcttcaaagtataaatgtgaaagatctcaaaattgacccatcttttttaaacattattcccgatgatgacttaacaaagagtgtacaggactgggtttatgctacaatatactctattgctcctgaattgagatccttcattgagttagaaatgaaatttggtgttattattgatgcgaaaggcccagatcgtgtaaatccaccagtttcttctcaatgtgttttcactgagcttgatgcccatttaacgcctaatattgatgcatctttgttcaaagagttgagcaaatatattcgtggtattagcgaagtcactgaaaatacaggtaaattcagtattattgaatcccagacaagagattccgtctatagagtcggattatccacgcaaagaccaaggtttttgagaatgagtacagatattaagactgggagggtaggacaatttatagagaaaagacatgtagcccaattattattatattctccaaaagatagttacgacgttaaaatctccttgaacttggaattacctgtacctgacaacgatccgccagaaaaatataaatctcaaagcccaattagtgaaaggacgaaagaccgtgttagttacattcataatgattcctgtaccagaattgatattacaaaagtcgaaaatcataaccaaaattctaaaagtagacaaagtgagaccactcacgaagtggaattggaaatcaacacgcctgcattattaaacgcctttgataacataacgaacgatagtaaagaatatgcatctcttattagaacgtttttgaataatggtacaattattagaagaaagttatcttctttatcttatgaaatttttgaaggttccaagaaagtcatgtga

SEQ ID NO: 10989 - DNA, 1005 bp, Saccharomyces cerevisiae
atgagagcgttgagattcctgattgagaacagaaacactgtcttttttacgctcttagtagccttggtgctttcactgtatttattggtctatttattttcgcatacaccaaggccgccatatccagaggagctcaaatacatagctattgatgaaaaaggtcatgaagttagtcgtgccttacctaacttgaatgaacaccaagatgacgaagaaatatttttatctgttgttatcccaagctataatgagacaggtagaattttactaatgttgacagacgcaatcagctttttaaaggaaaaatatggttccagatgggagattgtcatagtggatgatggttccacagataataccacacaatactgtttgaaaatttgtaaagaacagttcaaattgaactacgaacaattcagaatcatcaagttttctcaaaacagaggcaaaggtggcgcagtgagacaaggttttttacatattagaggtaagtatggtctttttgccgatgctgatggtgctagtaagttcagtgatgtagaaaaactaatagatgctattagcaaaattgaaacgtctagtacagatctaaaaacgactaaaccagcagtagcaattggttccagagcacatatggtaaataccgaagccgtcataaagagatcaatgataagaaactgcttgatgtacggtttccataccttagttttcatcttcggcatcaggtctatcaaagacacacaatgtggattcaaattgttcaacagagccgctatattgaaaatttttccgtatttgcatacagagggttggatctttgacgttgaaattttgatcttagccatcagaaaaagaatccaaattgaggagataccaatttcctggcatgaggttgatggctctaagatggctttagctattgatagtatcaaaatggcgaaagacttggttattataagaatggcctatttattagggatatatagagataataagaaatgttag

SEQ ID NO: 10990 - DNA, 1005 bp, Artificial Sequence
  Description of Artificial Sequence: Synthetic polynucleotide
atgagagcgttgagattcttgattgagaacagaaacactgtcttttttacgctcttagtagccttggtgctttctttgtatttattggtctatttattttctcatacaccaaggccgccatatccagaggagctcaaatacatagctattgatgaaaaaggtcatgaagttagtcgtgccttacctaacttgaatgaacaccaagatgacgaagaaatatttttatctgttgttatcccaagctataatgagacaggtagaattttattgatgttgacagacgcaatcagctttttaaaggaaaaatatggttccagatgggagattgtcatagtggatgatggttccacagataataccacacaatactgtttgaaaatttgtaaagaacagttcaaattgaactacgaacaattcagaatcatcaagttttctcaaaacagaggcaaaggtggcgcagtgagacaaggttttttacatattagaggtaagtatggtctttttgccgatgctgatggtgctagtaagttcagtgatgtagaaaaattgatagatgctattagcaaaattgaaacgtctagtacagatttgaaaacgactaaaccagcagtagcaattggttccagagcacatatggtaaataccgaagccgtcataaagagaagtatgataagaaactgcttgatgtacggtttccataccttagttttcatcttcggcatcaggtctatcaaagacacacaatgtggattcaaattgttcaacagagccgctatattgaaaatttttccgtatttgcatacagagggttggatctttgacgttgaaattttgatcttagccatcagaaaaagaatccaaattgaggagataccaatttcctggcatgaggttgatggctctaagatggctttagctattgatagtatcaaaatggcgaaagacttggttattataagaatggcctatttattagggatatatagagataataagaaatgttga

SEQ ID NO: 10991 - DNA, 3591 bp, Saccharomyces cerevisiae
atgcctccaaagaagtttaaggatctaaactctttccttgacgaccaaccaaaggacccaaatctagtcgcttctcccttcggtggttattttaaaaaccctgctgctgatgccggtagtaataacgcttccaaaaaaagtagctaccaacaacagcgtaattggaaacaggggggcaactaccaacaaggtggttaccaatcgtataacagtaattacaacaattacaacaactacaacaactacaacaattataacaactacaataactataataaatacaatggccagggctatcaaaaatctacttacaaacaatcggctgtgacgcccaaccaaagtggaactccaactccatctgcttctactacatctttgacctctttgaatgaaaagctgtcgaacttagagttaacacccatctctcaatttttgtcaaagatacctgaatgtcaaagtatcactgattgcaaaaatcaaatcaaactaatcattgaagaatttggcaaagaaggtaacagtacgggtgagaaaattgaagagtggaaaatcgtcgatgttctatctaaattcatcaaacctaagaatccatcattagttagagaatctgccatgctaataatttccaacattgctcaatttttcagtggaaagccaccacaggaagcatacttgctaccattcttcaatgtcgcacttgactgtatttcagataaagagaatacagtcaaacgtgccgcgcaacatgccattgattctttgttgaattgctttccaatggaggctttaacctgttttgtactgcctacgattttggattacttatcatctggtgccaaatggcaagctaaaatggccgctctaagcgttgtagatagaataagagaagattcggcgaacgatttattggaacttactttcaaagatgcagttccagttttaaccgatgtagcaactgatttcaaacctgaattggccaaacaaggttacaaaactttattggactacgtttctattttggataacttagatttgtctcctcgttataaattgatcgtggacaccctgcaagatccatctaaggttcctgaatctgtaaaatcgttatccagtgttacatttgtcgctgaagttacggaaccttcactatctttgttagttcctattctaaacagatctttaaacctatcgtcatcatctcaagagcaattaagacaaaccgttattgtcgtggagaatttgacaagattggtgaataatcgtaatgaaattgaaagcttcatccctctactactacccggtatccaaaaggttgttgatactgcgtccttacctgaagttcgtgaattggctgaaaaggcccttaacgttctaaaagaagatgacgaagctgataaggaaaacaaattctcaggcagactgactttagaagaaggtagggatttcttacttgatcacctcaaggacattaaagctgatgattcctgttttgtcaagccttacatgaatgacgaaactgttatcaagtatatgagcaagattttgaccgtggattctaatgtgaacgactggaaaagacttgaagattttttgaccgccgtttttggtggttcagattcacaaagagaatttgtcaaacaagactttatccataacttgagagctttattctaccaagaaaaggaaagggcagatgaggacgaaggtattgagattgtcaacactgatttctccttagcttatggttcaagaatgcttttgaacaaaacaaatcttcgtctcctaaagggtcatcgttacggtttgtgtggtagaaatggtgctggtaagtctactttaatgagagcaattgctaatggtcaattggatggttttcctgacaaggatacattacgcacctgtttcgtcgaacataaattgcaaggtgaagaaggtgatttagacttggtttccttcattgctttagatgaagaactgcaatctacttctcgtgaggaaattgcagccgctttagaatctgtcggttttgatgaagagagaagagcacaaactgttggatctttatctggtggttggaaaatgaagttggaattggcaagagctatgttacaaaaagctgatattttattgctggatgaacctaccaatcatttagatgtttcgaacgttaaatggttagaagaatacttactggaacatactgatattacttcattgattgtttcgcatgactctggtttcttagatacagtctgtactgacatcatccattatgaaaacaagaaattggcttactacaaaggtaacttggcagcatttgttgagcagaaacctgaagctaaatcttactataccttaacagattctaatgctcaaatgcgtttcccacccccaggtattttaacaggtgttaagtctaacactagagccgtcgctaaaatgactgatgtaactttctcttatccaggtgcccaaaagccttccttaagccatgtctcctgttcattgtctctgtcttctcgtgtggcttgtttaggtcctaacggtgctggtaaatccactttgatcaagctattaactggtgaattggttccaaatgaaggtaaagtggaaaaacatccaaatttacgtattggttatattgctcagcatgcattgcaacacgtcaatgaacataaggaaaagacggcaaaccaatatttgcaatggcgttatcaattcggtgacgaccgtgaagtcttattgaaggaatccagaaaaatatccgaagatgaaaaggaaatgatgacaaaggaaatcgacattgatgacggtagaggtaagagagccattgaagctattgtaggtagacaaaagttgaaaaaatctttccaatatgaggtcaaatggaaatactggaaaccaaaatacaactcctgggttccaaaagatgttttggtcgagcatggctttgaaaaattggttcaaaaattcgacgatcacgaagcctccagagaagggttgggttaccgtgaattaattccttcagttatcaccaaacattttgaagacgttggtcttgattctgaaattgctaaccatactccattaggttctttatctggtggtcaattagttaaagtcgttattgccggtgctatgtggaacaaccctcatttacttgttttggatgaacctaccaactatttggacagagactctcttggtgctttggccgttgctattcgtgactggagtggtggtgtcgttatgatttcgcataataacgaatttgttggtgctttatgtcctgaacaatggattgtggagaacggtaaaatggttcaaaagggctctgcacaagttgaccaatccaaattcgaagatggtggtaatgctgatgccgttggtctaaaggcctccaacttggccaagccatctgtagatgacgatgattctccagctaacatcaaggtcaagcaaagaaagaagagattgacaagaaatgaaaagaagctgcaagccgaacgtcgtcgtctacgttacattgagtggttgtcatcgccaaaaggtacaccaaaaccagttgatactgacgatgaagaagattga

SEQ ID NO: 10992 - DNA, 3591 bp, Artificial Sequence
  Description of Artificial Sequence: Synthetic polynucleotide
atgcctccaaagaagtttaaggatttgaactctttccttgacgaccaaccaaaggacccaaatttggtcgcttctcccttcggtggttattttaaaaaccctgctgctgatgccggtagtaataacgcttccaaaaaaagtagctaccaacaacagcgtaattggaaacaggggggcaactaccaacaaggtggttaccaaagttataacagtaattacaacaattacaacaactacaacaactacaacaattataacaactacaataactataataaatacaatggccagggctatcaaaaatctacttacaaacaatctgctgtgacgcccaaccaaagtggaactccaactccatctgcttctactacatctttgacctctttgaatgaaaagctttccaacttagagttaacacccatctctcaatttttgtccaagatacctgaatgtcaaagtatcactgattgcaaaaatcaaatcaaattaatcattgaagaatttggcaaagaaggtaacagtacgggtgagaaaattgaagagtggaaaatcgtcgatgttttatctaaattcatcaaacctaagaatccatctttagttagagaatctgccatgttgataatttccaacattgctcaatttttcagtggaaagccaccacaggaagcatacttgttaccattcttcaatgtcgcacttgactgtatttctgataaagagaatacagtcaaacgtgccgcgcaacatgccattgattctttgttgaattgctttccaatggaggctttaacctgttttgtattacctacgattttggattacttatcttctggtgccaaatggcaagctaaaatggccgctttgagcgttgtagatagaataagagaagattctgcgaacgatttattggaacttactttcaaagatgcagttccagttttaaccgatgtagcaactgatttcaaacctgaattggccaaacaaggttacaaaactttattggactacgtttctattttggataacttagatttgtctcctcgttataaattgatcgtggacaccttacaagatccatctaaggttcctgaatctgtaaaatctttatccagtgttacatttgtcgctgaagttacggaaccttctttatctttgttagttcctattttgaacagatctttaaacttatcttcttcttctcaagagcaattaagacaaaccgttattgtcgtggagaatttgacaagattggtgaataatcgtaatgaaattgaaagcttcatccctttattattgcccggtatccaaaaggttgttgatactgcgtccttacctgaagttcgtgaattggctgaaaaggcccttaacgttttgaaagaagatgacgaagctgataaggaaaacaaattcagtggcagattaactttagaagaaggtagggatttcttacttgatcacctcaaggacattaaagctgatgattcctgttttgtcaagccttacatgaatgacgaaactgttatcaagtatatgagcaagattttgaccgtggattctaatgtgaacgactggaaaagacttgaagattttttgaccgccgtttttggtggttctgattctcaaagagaatttgtcaaacaagactttatccataacttgagagctttattctaccaagaaaaggaaagggcagatgaggacgaaggtattgagattgtcaacactgatttctccttagcttatggttccagaatgcttttgaacaaaacaaatcttcgtctcttgaagggtcatcgttacggtttgtgtggtagaaatggtgctggtaagtctactttaatgagagcaattgctaatggtcaattggatggttttcctgacaaggatacattacgcacctgtttcgtcgaacataaattgcaaggtgaagaaggtgatttagacttggtttccttcattgctttagatgaagaattacaatctacttctcgtgaggaaattgcagccgctttagaatctgtcggttttgatgaagagagaagagcacaaactgttggatctttatctggtggttggaaaatgaagttggaattggcaagagctatgttacaaaaagctgatattttattgttggatgaacctaccaatcatttagatgtttctaacgttaaatggttagaagaatacttattggaacatactgatattacttctttgattgtttctcatgactctggtttcttagatacagtctgtactgacatcatccattatgaaaacaagaaattggcttactacaaaggtaacttggcagcatttgttgagcagaaacctgaagctaaatcttactataccttaacagattctaatgctcaaatgcgtttcccacccccaggtattttaacaggtgttaagtctaacactagagccgtcgctaaaatgactgatgtaactttctcttatccaggtgcccaaaagccttccttaagccatgtctcctgttctttgtctttatcttctcgtgtggcttgtttaggtcctaacggtgctggtaaatccactttgatcaagcttttaactggtgaattggttccaaatgaaggtaaagtggaaaaacatccaaatttacgtattggttatattgctcagcatgcattgcaacacgtcaatgaacataaggaaaagacggcaaaccaatatttgcaatggcgttatcaattcggtgacgaccgtgaagtcttattgaaggaatccagaaaaatatccgaagatgaaaaggaaatgatgacaaaggaaatcgacattgatgacggtagaggtaagagagccattgaagctattgtaggtagacaaaagttgaaaaaatctttccaatatgaggtcaaatggaaatactggaaaccaaaatacaactcctgggttccaaaagatgttttggtcgagcatggctttgaaaaattggttcaaaaattcgacgatcacgaagcctccagagaagggttgggttaccgtgaattaattccttctgttatcaccaaacattttgaagacgttggtcttgattctgaaattgctaaccatactccattaggttctttatctggtggtcaattagttaaagtcgttattgccggtgctatgtggaacaaccctcatttacttgttttggatgaacctaccaactatttggacagagactctcttggtgctttggccgttgctattcgtgactggagtggtggtgtcgttatgatttctcataataacgaatttgttggtgctttatgtcctgaacaatggattgtggagaacggtaaaatggttcaaaagggctctgcacaagttgaccaatccaaattcgaagatggtggtaatgctgatgccgttggtttgaaggcctccaacttggccaagccatctgtagatgacgatgattctccagctaacatcaaggtcaagcaaagaaagaagagattgacaagaaatgaaaagaagttacaagccgaacgtcgtcgtttgcgttacattgagtggttgtcttctccaaaaggtacaccaaaaccagttgatactgacgatgaagaagattga

SEQ ID NO: 10993 - DNA, 441 bp, Saccharomyces cerevisiae
atgtctacttttaatgcagaaaccgctgataacttggaagatatcgagaaacaattcgctgttgttgctgttgaacaagcggaaacatattggaaactattaacaagtgttcccggttccaagttacgtttgactaagtttgatgacgaaatatacgagaattttatggagagattcccagaatacaaagatgttgaaagggtcaaaaagtttacggaggaagaattaaaaacaaaagaagccaaggaaagatggagaaagttcttcacaatttttgagaaaaaaatcgaagactataactttggtactttgttgaggacagacgcttcagccgagtatggtcaatttactacttgttttgtcgtgagactacaattttacgcttttgaaattgctagaaataaacacggcttgaacgattggattgtcggtcagaaatga

SEQ ID NO: 10994 - DNA, 441 bp, Artificial Sequence
  Description of Artificial Sequence: Synthetic polynucleotide
atgtctacttttaatgcagaaaccgctgataacttggaagatatcgagaaacaattcgctgttgttgctgttgaacaagcggaaacatattggaaattattaacaagtgttcccggttccaagttacgtttgactaagtttgatgacgaaatatacgagaattttatggagagattcccagaatacaaagatgttgaaagggtcaaaaagtttacggaggaagaattaaaaacaaaagaagccaaggaaagatggagaaagttcttcacaatttttgagaaaaaaatcgaagactataactttggtactttgttgaggacagacgcttctgccgagtatggtcaatttactacttgttttgtcgtgagattacaattttacgcttttgaaattgctagaaataaacacggcttgaacgattggattgtcggtcagaaatga

SEQ ID NO: 10995 - DNA, 1455 bp, Saccharomyces cerevisiae
atgctacggataagtattgactctatcaagcaattcggttcctttgtgccaggttataacaacactagttaccatgctgccgggagggccataagaacatcaagcctgtacagtacaatgatctcagccaacccgagaaggtgcctgcattcttcgaaactgctaaataaagaaggtcaagaagagggctataatgaacagctcatttcaaaaatgtcttcacagaatggatcgaattccagacagaatgaaagtgaaggaaagaaggaaggcaaggcttcctctgtgaagtcgttgttgcaacatactcatagtcacagccacacacatatgcatgacaatcctttattgtcactgaacgtacagcagatcaagaagaatcctggcgtaagaataacatggataggacttgcatcaaatgtggggatggcagtaggaaaatttgtaggaggaatcacttttcattctcaagcattacttgctgattccgtacatgctcttagcgatttggtatctgattttttaacactgttttctgtccaatatgcgtctcgtaaaccaacttcggagtacccatatggctatggtaaagtggaaactgtgggatctttggcagtatccacaatcttagcaatggctggtatatctatcggttggtcgtcgttatgcgctattgtggggcctgtcattcctcatgccattctagaatcgatggccggtttaattggtgaaacgcattcccattctcagtcgctaacacaacaggcaactaatgtaaatgctgtatggatagcagcgggttctatcttggttaaagaatgggtttttcaggcaacaaagaaagttgcaatccaaacaaattctaatgtactaatggcaaacgcctggcatcatcgtgttgactccttgacatcgttggtagcgttggtcgctatcacatctagttattttttcaacattcaatccttagataatttaggtgggcttgtagtgtcaggtttgatcataaaaacaggtggacaaggtatcttatcctcactgaaggagttagttgaccaatctataccacctactgatccgcgttatctagaaatcgaatctgtcataaaagacagcattggcagtttgaaaacagacttagatctcaaacagtcgttacatgttagagaccttactatattagcttccggtcctaatcttcgtgccaccacaactttggaagtgccagtattacattcaggtcaggaagttgggataagatttttggaaaacgctatttcgactataagagaggatttacgtatgaaggtgccaaacgtggggaaggtggacgtcgagtttgttgatgtaacctctgactctaaaggtgatttggagcactctcatgacactaaatcaacaaatcatactcatactcattctgattctgccgatactcacacccataaacattag

SEQ ID NO: 10996 - DNA, 1455 bp, Artificial Sequence
  Description of Artificial Sequence: Synthetic polynucleotide
atgttgagaataagtattgactctatcaagcaattcggttcctttgtgccaggttataacaacactagttaccatgctgccgggagggccataagaacatctagcttgtacagtacaatgatcagtgccaacccgagaaggtgcttgcattcttctaaattattgaataaagaaggtcaagaagagggctataatgaacagctcatttccaaaatgtcttctcagaatggaagtaattccagacagaatgaaagtgaaggaaagaaggaaggcaaggcttcctctgtgaagtctttgttgcaacatactcatagtcacagccacacacatatgcatgacaatcctttattgtctttgaacgtacagcagatcaagaagaatcctggcgtaagaataacatggataggacttgcatctaatgtggggatggcagtaggaaaatttgtaggaggaatcacttttcattctcaagcattacttgctgattccgtacatgctcttagcgatttggtatctgattttttaacattattttctgtccaatatgcgtctcgtaaaccaacttccgagtacccatatggctatggtaaagtggaaactgtgggatctttggcagtatccacaatcttagcaatggctggtatatctatcggttggtcctctttatgcgctattgtggggcctgtcattcctcatgccattttggaaagtatggccggtttaattggtgaaacgcattcccattctcagtccttaacacaacaggcaactaatgtaaatgctgtatggatagcagcgggttctatcttggttaaagaatgggtttttcaggcaacaaagaaagttgcaatccaaacaaattctaatgtattaatggcaaacgcctggcatcatcgtgttgactccttgacatctttggtagcgttggtcgctatcacatctagttattttttcaacattcaatccttagataatttaggtgggcttgtagtgagtggtttgatcataaaaacaggtggacaaggtatcttatcctctttgaaggagttagttgaccaatctataccacctactgatccgcgttatttggaaatcgaatctgtcataaaagacagcattggcagtttgaaaacagacttagatctcaaacagtctttacatgttagagaccttactatattagcttccggtcctaatcttcgtgccaccacaactttggaagtgccagtattacattctggtcaggaagttgggataagatttttggaaaacgctatttctactataagagaggatttacgtatgaaggtgccaaacgtggggaaggtggacgtcgagtttgttgatgtaacctctgactctaaaggtgatttggagcactctcatgacactaaatctacaaatcatactcatactcattctgattctgccgatactcacacccataaacattga

SEQ ID NO: 10997 - DNA, 507 bp, Saccharomyces cerevisiae
atgtccaatctattaaacaagtttgctgataagttgcacggcaacgatcatgatgaacgttacgaagacgacaatgacgaccagactagacaacagcgtcatgaaaaacatcaacagagggaattcaggaatcaaggatccaaggccgatccctacggcgaagaaaaccaagggaatttccctcaacgccagcagccacagtctaatctaggcggtaacacgcagtttggcggtaacgacttccagcaacaaactactgactacactgccggcactggtggtggcacttatacccaaacttaccgcgaaactaacactcaaggtcagttggacgacgatgaagacgatgacttcttgacttcgggccaacagcaaaaacaaggtcgtacaagaggtgctcaaagtaaccgctaccaatcctctaatatcggcagcggtagacgcgatctgtctgggtcaggaaacgatgaatatgatgatgatagtgggaaccaaggcgtctggtag

SEQ ID NO: 10998 - DNA, 507 bp, Artificial Sequence
  Description of Artificial Sequence: Synthetic polynucleotide
atgtccaatttattaaacaagtttgctgataagttgcacggcaacgatcatgatgaacgttacgaagacgacaatgacgaccagactagacaacagcgtcatgaaaaacatcaacagagggaattcaggaatcaaggatccaaggccgatccctacggcgaagaaaaccaagggaatttccctcaacgccagcagccacagtctaatttgggcggtaacacgcagtttggcggtaacgacttccagcaacaaactactgactacactgccggcactggtggtggcacttatacccaaacttaccgcgaaactaacactcaaggtcagttggacgacgatgaagacgatgacttcttgacttctggccaacagcaaaaacaaggtcgtacaagaggtgctcaaagtaaccgctaccaatcctctaatatcggcagcggtagacgcgatttatctgggtctggaaacgatgaatatgatgatgatagtgggaaccaaggcgtctggtga

SEQ ID NO: 10999 - DNA, 2067 bp, Saccharomyces cerevisiae
atgggggaaaaaaggacaataatcaaagcgctgaaaaactctgcagcgtcccacttcatcaagaagttgaccgcagatacttccctgtcgtccatacaagaggcaataaacgtcgtgcagcagtacaatgcaacggatcccgtgagattaaagcttttccatacgcctcggatggtttcgcagggggctcattttgcattttgtttgcccactaagaaaccacattacaagccattactgctttcgcaaaacgcacttgatgagtttaatttggtgcaggatcaggacttggagaaaatactatccggtgagaaagtatattattccgatagtatctttccctatagtacagtgtactccggatttcaattcggctcatttgctgcacagctgggagacggacgtgtggtaaacttgtttgatcttaaggacaagtgtagcggacaatggcaaacgtttcagttgaaaggtgccggtatgacgccattttctcggtttgcagatgggaaagctgtgttaagatcaagcatacgtgaattcataatgagcgaggcgttgcacagtattggaattccatccacaagagctatgcaattaactctgttaccggggacgaaggcgcaaaggcgcaatcaagaaccgtgcgctgttgtatgccgttttgcgcccagctggatccgcttgggtaacttcaacctattcagatggcggcacgacttgaaagggttgatccaactatcagattattgcattgaggaattgtttgctggggggacccaatttgaggggaaacccgactttaatatattcaaaagggatttttttcctgacactgagacgaagattgatgagcaggtggaaaaggatgaaactgaggtgagtaccatgaccggagataacatttccacattgagcaaatatgatgagtttttcagacatgtagttagcttgaatgcaaacacagtggcccattggcaagcgtatgggtttgctaacggtgttttgaatacggataacacctccattatgggcctgacaattgattatggcccctttgccttcctggacaagtttgaaccaagctttaccccgaaccatgatgacacagcgaagagatattcgtttgccaaccagccaagcattatatggtggaacttgcaacagtttgccaaggatctcgcatgtctgctgggtcctgaggcccgtgaccttgaattgttacttaagggcgaactgaattctgttgatgacgccctagagaaaaccatgattgaaagggtccagaagttggtagagctcagtgctaatgagtacaagtatgtgtttacgacaaggtacgcgcagataatgtctcaaagactcggtgtagatctggatctggaaaagtgcatgtcttctacaaacctcaaagatatcgaacatgcagccgagaaggctaaagagttctgcgatgttatcgtcgaaccattgctagatattctgcaggccacaaaagtcgactataacaatttttttatccatctacaaaattacaaggggcccttcttcatcaaagataaaagtgacaccgcaacactttttggagcattcgatgaagagtacttgggtatgttcttcaactccaagcaactgcagcaaatggcagaaactgaagaggccttcgcggctggtgagaaggtctttgacgctaacggcgaattgcgtttgctcaacgaaaaattgcaagaaatacgcaattggacccaagactatttgaccttggtcccacccacggaaactgctgcaagagcgtcgcttgccaagaaagccaacccgttgtttgtccccagaagttgggtactggaggaagtagtcgacgatttaatgtacagtcaaagggatggcctacaagatcccagttcggagctagatacatctgcgttgaagaagctatacctaatgagcgtaaacccatacgaccgcacgaaatgggatgtcactctgcggccagaactggagacaaaatgggctgacctttcccaccaagatgacgctaagtttatgatgcaagcttcctgcagtagctaa

SEQ ID NO: 11000 - DNA, 2067 bp, Artificial Sequence
  Description of Artificial Sequence: Synthetic polynucleotide
atgggggaaaaaaggacaataatcaaagcgttgaaaaactctgcagcgtcccacttcatcaagaagttgaccgcagatacttccttatcttccatacaagaggcaataaacgtcgtgcagcagtacaatgcaacggatcccgtgagattaaagcttttccatacgcctagaatggtttctcagggggctcattttgcattttgtttgcccactaagaaaccacattacaagccattattactttctcaaaacgcacttgatgagtttaatttggtgcaggatcaggacttggagaaaatattatccggtgagaaagtatattattccgatagtatctttccctatagtacagtgtactccggatttcaattcggctcttttgctgcacagttaggagacggacgtgtggtaaacttgtttgatcttaaggacaagtgtagcggacaatggcaaacgtttcagttgaaaggtgccggtatgacgccattttctagatttgcagatgggaaagctgtgttaagaagcagcatacgtgaattcataatgagcgaggcgttgcacagtattggaattccatccacaagagctatgcaattaactttattaccggggacgaaggcgcaaaggcgcaatcaagaaccgtgcgctgttgtatgccgttttgcgcccagctggatccgcttgggtaacttcaacttgttcagatggagacacgacttgaaagggttgatccaattaagtgattattgcattgaggaattgtttgctggggggacccaatttgaggggaaacccgactttaatatattcaaaagggatttttttcctgacactgagacgaagattgatgagcaggtggaaaaggatgaaactgaggtgagtaccatgaccggagataacatttccacattgagcaaatatgatgagtttttcagacatgtagttagcttgaatgcaaacacagtggcccattggcaagcgtatgggtttgctaacggtgttttgaatacggataacacctccattatgggcttaacaattgattatggcccctttgccttcttggacaagtttgaaccaagctttaccccgaaccatgatgacacagcgaagagatattcttttgccaaccagccaagcattatatggtggaacttgcaacagtttgccaaggatctcgcatgtcttttgggtcctgaggcccgtgaccttgaattgttacttaagggcgaattgaattctgttgatgacgccttagagaaaaccatgattgaaagggtccagaagttggtagagctcagtgctaatgagtacaagtatgtgtttacgacaaggtacgcgcagataatgtctcaaagactcggtgtagatttggatttggaaaagtgcatgtcttctacaaacctcaaagatatcgaacatgcagccgagaaggctaaagagttctgcgatgttatcgtcgaaccattgttggatattttacaggccacaaaagtcgactataacaatttttttatccatttacaaaattacaaggggcccttcttcatcaaagataaaagtgacaccgcaacactttttggagcattcgatgaagagtacttgggtatgttcttcaactccaagcaattgcagcaaatggcagaaactgaagaggccttcgcggctggtgagaaggtctttgacgctaacggcgaattgcgtttgctcaacgaaaaattgcaagaaatacgcaattggacccaagactatttgaccttggtcccacccacggaaactgctgcaagagcgtcccttgccaagaaagccaacccgttgtttgtccccagaagttgggtattggaggaagtagtcgacgatttaatgtacagtcaaagggatggcttacaagatcccagtagtgagttagatacatctgcgttgaagaagttgtacttgatgagcgtaaacccatacgaccgcacgaaatgggatgtcactttgagaccagaattagagacaaaatgggctgacctttcccaccaagatgacgctaagtttatgatgcaagcttcctgcagtagctga

SEQ ID NO: 11001 - DNA, 2382 bp, Saccharomyces cerevisiae
atgcaagtactagtgacgctctggtgtctaatatgcacatgcctggtactaccagtggccgccaagaaaaggacactgacagcgagttcactggtcacgtgcatggagaactcacagctttcagccaatagtttcgatgtgtcgttttctccagacgatcgatcgctacattacgatctggatatgaccacgcagatcgactcttacatctacgcttatgtggacgtgtatgcctacgggttcaagattattacggagaacttcgacgtgtgttcaatgggttggaagcagttttgccctgtgcacccaggtaacatacaaatcgactccattgaatacattgcccagaagtacgtgaaaatgattccgggaattgcctaccaagtgcccgatattgatgcgtacgtaagattgaacatttataacaacgtaagtgaaaatttggcttgtatccaggttttcttttccaatgggaaaactgtatcacaaattggggttaaatgggtgacagctgttatcgccggtattggtttattaacttccgctgtcttgtccaccttcgggaactccacagcagcatctcacatttctgcaaacaccatgtcactgttcttatatttccaatctgtcgctgtggtcgcaatgcaacatgtagacagtgttccacccattgctgctgcctggtctgaaaaccttgcctggtcgatgggcttgatccgtattacatttatgcagaaaatcttccgttggtatgtagaggcgactggaggctccgcatctctatatttgaccgcgacaacaatgtcagtgctcactcaacgaggtctggattaccttaaaaatacttcggtttacaagagggcggaaaatgtcttgtacggtaactcaaacactttaatctttcgaggaattaaaagaatgggataccgtatgaagattgaaaatacggccatcgtttgtactgggttcacattctttgtgctgtgcggttattttttggccgggtttatcatggcctgcaaatacagtatcgagttatgtataagatgtggttggatgcggagtgataggttttaccaatttaggaaaaactggaggtcagttctgaaaggatcgttgttaagatacatctatattgggttcacgcaactgacaattttaagtttttgggagttcactgaacgggattccgccggtgttattgttattgcatgcctattcattgtattgtcatgcgggttgatggcgtgggctgcgtacagaaccatttttttcgcaagtaaatctgtggaaatgtacaataacccagctgctttattgtatggtgatgagtacgtcttaaacaagtacgggtttttctacaccatgttcaacgcaaaacattattggtggaatgctcttttaacgacgtatattcttgtaaaagctttatttgtcggattcgcacaggcatcaggtaaaacgcaagcattggctattttcattattgacttggcgtattttgttgccatcatccgttataaaccatatttggaccgtccaacgaatattgtcaacatttttatttgcactgtcaccttggtcaactctttccttttcatgtttttctcaaacttgtttaaccaaaagtatgctgtctctgccatcatgggctgggtgtttttcattatgaatgctgcgttttctttgcttctactgttgatgattctggcctttaccacaatcattctgttttctaagaatcctgactccaggttcaagccagcaaaggatgacagagcatctttccaaaagcatgctattcctcatgaaggtgccttgaataagtcagtggccaacgaattaatggccctaggtaatgtggcaaaggatcataccgaaaattgggaatacgaactgaagagtcaagaaggtaaaagtgaagataatcttttcggagttgaatacgatgacgagaaaacaggaactaattcagagaatgctgaaagtagcagtaaggaaaccacccgtccaaccttttctgaaaaggttttacgttcattatcaatcaaaaggaataagagtaaactgggcagtttcaagcgcagcgctccggataagataacacaacaagaggtttctcctgaccgcgccagctcttcgcctaacagcaagtcataccccggtgtctcgcacaccaggcaagaatctgaagcgaataatgggctaatcaatgcatatgaagatgagcaattcagtctgatggaaccaagcatactggaagacgctgctagttccacccaaatgcatgctatgccagcccgagatttgagcttgagcagtgttgcaaacgcccaagatgttactaaaaaagcaaacatcctggatcctgattatttgtaa

SEQ ID NO: 11002 - DNA, 2382 bp, Artificial Sequence
  Description of Artificial Sequence: Synthetic polynucleotide
atgcaagtattggtgacgctctggtgtttgatatgcacatgcttagtattgccagtggccgccaagaaaaggacattaacagcgagttctttggtcacgtgcatggagaactctcagctttctgccaatagtttcgatgtgtccttttctccagacgatagatccttgcattacgatttggatatgaccacgcagatcgactcttacatctacgcttatgtggacgtgtatgcctacgggttcaagattattacggagaacttcgacgtgtgttccatgggttggaagcagttttgccctgtgcacccaggtaacatacaaatcgactccattgaatacattgcccagaagtacgtgaaaatgattccgggaattgcctaccaagtgcccgatattgatgcgtacgtaagattgaacatttataacaacgtaagtgaaaatttggcttgtatccaggttttcttttccaatgggaaaactgtatctcaaattggggttaaatgggtgacagctgttatcgccggtattggtttattaacttccgctgtcttgtccaccttcgggaactccacagcagcatctcacatttctgcaaacaccatgtctttattcttatatttccaatctgtcgctgtggtcgcaatgcaacatgtagacagtgttccacccattgctgctgcctggtctgaaaaccttgcctggtctatgggcttgatccgtattacatttatgcagaaaatcttccgttggtatgtagaggcgactggaggctccgcatctttgtatttgaccgcgacaacaatgtctgtgctcactcaaagaggtttggattaccttaaaaatacttctgtttacaagagggcggaaaatgtcttgtacggtaactccaacactttaatctttagaggaattaaaagaatgggataccgtatgaagattgaaaatacggccatcgtttgtactgggttcacattctttgtgctttgcggttattttttggccgggtttatcatggcctgcaaatacagtatcgagttatgtataagatgtggttggatgagaagtgataggttttaccaatttaggaaaaactggaggtctgttttgaaaggatctttgttaagatacatctatattgggttcacgcaattgacaattttaagtttttgggagttcactgaaagagattccgccggtgttattgttattgcatgccttttcattgtattgtcttgcgggttgatggcgtgggctgcgtacagaaccatttttttcgcaagtaaatctgtggaaatgtacaataacccagctgctttattgtatggtgatgagtacgtcttaaacaagtacgggtttttctacaccatgttcaacgcaaaacattattggtggaatgctcttttaacgacgtatattcttgtaaaagctttatttgtcggattcgcacaggcatctggtaaaacgcaagcattggctattttcattattgacttggcgtattttgttgccatcatccgttataaaccatatttggaccgtccaacgaatattgtcaacatttttatttgcactgtcaccttggtcaactctttccttttcatgtttttcagtaacttgtttaaccaaaagtatgctgtctctgccatcatgggctgggtgtttttcattatgaatgctgcgttttctttgcttttgttgttgatgattttagcctttaccacaatcattttattttctaagaatcctgactccaggttcaagccagcaaaggatgacagagcatctttccaaaagcatgctattcctcatgaaggtgccttgaataagtctgtggccaacgaattaatggcccttggtaatgtggcaaaggatcataccgaaaattgggaatacgaattgaagagtcaagaaggtaaaagtgaagataatcttttcggagttgaatacgatgacgagaaaacaggaactaattctgagaatgctgaaagtagcagtaaggaaaccacccgtccaaccttttctgaaaaggttttacgttccttatctatcaaaaggaataagagtaaattgggcagtttcaagcgcagcgctccggataagataacacaacaagaggtttctcctgaccgcgccagctcttctcctaacagcaagtcctaccccggtgtctcccacaccaggcaagaatctgaagcgaataatgggttgatcaatgcatatgaagatgagcaattcagtttaatggaaccaagcatattggaagacgctgctagttccacccaaatgcatgctatgccagccagagatttgagcttgagcagtgttgcaaacgcccaagatgttactaaaaaagcaaacatcttagatcctgattatttgtga

SEQ ID NO: 11003 - DNA, 654 bp, Saccharomyces cerevisiae
atgtccaagatcacttcttctcaagtcagagaacacgtcaaggaattgttgaagtattccaacgaaaccaagaagagaaacttcttggaaaccgtcgaactacaagtcggtttgaagaactatgaccctcaaagagacaagcgtttctctggttctttgaagttgccaaattgtccaagaccaaacatgtccatctgtatcttcggtgatgctttcgatgttgacagagctaagtcttgcggtgttgacgctatgtccgtcgatgacttgaagaagttgaacaagaacaagaagttaatcaagaagttgtctaagaagtacaacgctttcattgcttctgaagttttgatcaagcaagttccaagactattgggtcctcaattgtccaaggctggtaagttcccaaccccagtttctcacaacgatgacttgtacggtaaggtcactgatgtcagatctaccatcaagttccaattgaagaaggtcttgtgtttggctgttgccgttggtaacgttgaaatggaagaagacgttttggttaaccaaatcttgatgtctgttaacttctttgtttctttgttgaagaagaactggcaaaatgttggttccttggttgttaagtcctccatgggtccagctttcagattgtactaa

SEQ ID NO: 11004 - DNA, 654 bp, Artificial Sequence
  Description of Artificial Sequence: Synthetic polynucleotide
atgtccaagatcacttcttctcaagtcagagaacacgtcaaggaattgttgaagtattccaacgaaaccaagaagagaaacttcttggaaaccgtcgaattacaagtcggtttgaagaactatgaccctcaaagagacaagcgtttctctggttctttgaagttgccaaattgtccaagaccaaacatgtccatctgtatcttcggtgatgctttcgatgttgacagagctaagtcttgcggtgttgacgctatgtccgtcgatgacttgaagaagttgaacaagaacaagaagttaatcaagaagttgtctaagaagtacaacgctttcattgcttctgaagttttgatcaagcaagttccaagattattgggtcctcaattgtccaaggctggtaagttcccaaccccagtttctcacaacgatgacttgtacggtaaggtcactgatgtcagatctaccatcaagttccaattgaagaaggtcttgtgtttggctgttgccgttggtaacgttgaaatggaagaagacgttttggttaaccaaatcttgatgtctgttaacttctttgtttctttgttgaagaagaactggcaaaatgttggttccttggttgttaagtcctccatgggtccagctttcagattgtactga

SEQ ID NO: 11005 - DNA, 1479 bp, Saccharomyces cerevisiae
atggctaatgatcaagatcccaacaagtctctcattaatgacgctttgactcggagtatgtccgaattttatgatgatgatgatgataacgacagtgacatgtgtagggcaaatgatgagggagaagacgtttttgaccttccacttaaggtaggcgtttctcaaagcaggaacttttcagaagtaaatgacgtgttagacccgctttctagtttgcatggtccgtccaagaaggtgagatttgaacagcaaaagcagcaacagcaacatcagcaacttcacaatgacttcaatacagatttcaacctgaaaagcccgtccagtaaaaaaatgggggtagaacagctgatccagtcagccaatgaaatcaacgattacctcgctaacaacattgacaaggtaaatagctttaactcagagctattgagcggcagtggcaagttacctgggagagtaaagagtgacacagcaactcaaggtaccggacgcttagattccatgtccaactttgctcttagcgatacggagttggacaatgatgacgataattatctcctggatccccttgcaaatgctagctctactacacccactgtggaacaccacggttacagcttattagacaaggctttatccacgtctgataaggaaaaaatatatacgaataaagtgaattcgaatagtcagatagatactgataatcactctcacgaaagtggaaacactaccaataacgaaacagatgaaaatgagagttcggagatcctggactacacaaaatttgattctttcccctatcccccgtcttctgcccccaatggggaaccaccagatttgaaagtgctaagcattgaatgtgagcaggaaaatgaaaaagagctacgacgaatatctttattattggatcattacgaatcaataccgaaaataccagaattgtcagacgatgaagcactatctaagttccgtgagaatatcgaattaattttacaactatctaagaaaattaacgataatgcgaacactttagcgatttcctccgaagatcctcaaaaatttgttaattttgtgatgaagaacccaccttccttatcattcagagattttatcgacagaatccagaataaatgcatgtttggtgccgtagtctatcttggagccacctatctacttcaacttgtgtttcttacgagagacgaaatggacggtcccataaagttgaaggctaaattacaggaggaccaagcccataggatcatcatatctacaataagaattgccaccaagctattagaagactttgtccactcacaaaactacatttgcaaagtcttcggtatttcaaaaagactgctgaccaaactggaaatttctttcatggcgagtgttaatttcgatggattaatgattacttgtgaaaaattagaaaaaacattgcatatccttgatgatacaagacaggcattaggaaacacatga

SEQ ID NO: 11006 - DNA, 1479 bp, Artificial Sequence
  Description of Artificial Sequence: Synthetic polynucleotide
atggctaatgatcaagatcccaacaagtctctcattaatgacgctttgactagaagtatgtccgaattttatgatgatgatgatgataacgacagtgacatgtgtagggcaaatgatgagggagaagacgtttttgaccttccacttaaggtaggcgtttctcaaagcaggaacttttctgaagtaaatgacgtgttagacccgctttctagtttgcatggtccgtccaagaaggtgagatttgaacagcaaaagcagcaacagcaacatcagcaacttcacaatgacttcaatacagatttcaacttgaaaagcccgtccagtaaaaaaatgggggtagaacagttaatccagtctgccaatgaaatcaacgattacctcgctaacaacattgacaaggtaaatagctttaacagtgagttattgagcggcagtggcaagttacctgggagagtaaagagtgacacagcaactcaaggtaccggacgcttagattccatgtccaactttgctcttagcgatacggagttggacaatgatgacgataattatctcttggatccccttgcaaatgctagctctactacacccactgtggaacaccacggttacagcttattagacaaggctttatccacgtctgataaggaaaaaatatatacgaataaagtgaatagtaatagtcagatagatactgataatcactctcacgaaagtggaaacactaccaataacgaaacagatgaaaatgagagtagtgagatcttggactacacaaaatttgattctttcccctatcccccgtcttctgcccccaatggggaaccaccagatttgaaagtgttgagcattgaatgtgagcaggaaaatgaaaaagagttaaggagaatatctttattattggatcattacgaaagtataccgaaaataccagaattgagtgacgatgaagcattatctaagttccgtgagaatatcgaattaattttacaattatctaagaaaattaacgataatgcgaacactttagcgatttcctccgaagatcctcaaaaatttgttaattttgtgatgaagaacccaccttccttatctttcagagattttatcgacagaatccagaataaatgcatgtttggtgccgtagtctatcttggagccacctatttacttcaacttgtgtttcttacgagagacgaaatggacggtcccataaagttgaaggctaaattacaggaggaccaagcccataggatcatcatatctacaataagaattgccaccaagcttttagaagactttgtccactctcaaaactacatttgcaaagtcttcggtatttccaaaagattattaaccaaattagaaatttctttcatggcgagtgttaatttcgatggattaatgattacttgtgaaaaattagaaaaaacattgcatatccttgatgatacaagacaggcattaggaaacacatga

SEQ ID NO: 11007 - DNA, 573 bp, Saccharomyces cerevisiae
atggctggttgggatatttttggttggttcagagatgtgttggcttcccttggtctgtggaacaaacatggtaaactacttttcttgggtttggataatgccggtaagaccacattgctacatatgttaaagaacgatagattggcaaccttacaaccaacatggcatccaacttctgaagaactggctattggtaacattaagtttacaactttcgatttgggtggtcatattcaagctcgtcgtttatggaaggattatttcccagaagttaatggtatcgtctttttagtcgatgctgctgaccctgaaagatttgatgaagcacgtgtcgaattagatgctttattcaacattgccgaattgaaggacgttccttttgtaattcttggtaacaagatcgatgctccaaacgccgtttctgaagcggagctacgttctgctttaggattattgaataccactggctctcaaagaattgaaggtcaaagaccagttgaagttttcatgtgttccgttgttatgagaaatggttatttagaggcgttccaatggttatctcaatatatttaa

SEQ ID NO: 11008 - DNA, 573 bp, Artificial Sequence
  Description of Artificial Sequence: Synthetic polynucleotide
atggctggttgggatatttttggttggttcagagatgtgttggcttcccttggtttatggaacaaacatggtaaattacttttcttgggtttggataatgccggtaagaccacattgttgcatatgttaaagaacgatagattggcaaccttacaaccaacatggcatccaacttctgaagaattggctattggtaacattaagtttacaactttcgatttgggtggtcatattcaagctcgtcgtttatggaaggattatttcccagaagttaatggtatcgtctttttagtcgatgctgctgaccctgaaagatttgatgaagcacgtgtcgaattagatgctttattcaacattgccgaattgaaggacgttccttttgtaattcttggtaacaagatcgatgctccaaacgccgtttctgaagcggagttgcgttctgctttaggattattgaataccactggctctcaaagaattgaaggtcaaagaccagttgaagttttcatgtgttccgttgttatgagaaatggttatttagaggcgttccaatggttatctcaatatatttga

SEQ ID NO: 11009 - DNA, 3552 bp, Saccharomyces cerevisiae
atggagcagtctaataaacagcaccgtaaggcgaaggagaagaatacagcaaaaaagaagctccatacgcagggtcataatgcaaaggcctttgccgtggcagccccaggtaagatggcgagaactatgcaaaggtcaagtgatgtgaacgaaagaaaactgcatgttcctatggttgatcgtacccctgaagatgatccgcctccatttatcgtcgctgtcgtgggtccacctggaacaggaaagactactttgattcggtccctcgtcaggagaatgacaaaaagcactttgaatgatattcaaggtcctattactgttgtctctggtaaacatagaagactaacttttttggagtgccctgcggacgatctgaatgcgatgattgatattgctaagattgccgacttggttcttttactaattgacggtaatttcggttttgaaatggaaacaatggaattcttaaatattgctcaacatcacggtatgccaagagtacttggtgtagctacacatcttgatctgtttaaatctcagtcaactttgagagcttctaagaaaagattaaagcacagattctggacggaagtttatcaaggtgcaaaattattttacctatctggtgtgattaatggaaggtatcctgatagagagattttaaacctttcacgatttatatctgttatgaaattcagaccattaaaatggaggaacgaacatccctatatgttggctgacagattcacagatttaactcatccggaattaatagagactcaaggactgcaaatcgaccgcaaagtcgctatctatggttatttgcacggtactcctttgccttctgctccgggcactagggtgcatattgctggtgttggtgatttctcagtagcacaaattgaaaaattaccagatccatgtcccacacctttttaccaacagaaactggatgattttgaacgtgaaaaaatgaaagaagaggcaaaggctaacggagaaattacaactgcctctacgacaagaagacgtaaaaggttagatgataaagataaattgatatatgctccaatgtccgatgtcggaggtgtgttgatggataaggatgctgtttatattgatattggaaagaaaaatgaagagccaagttttgttcccggccaagaaagaggtgaaggagaaaaactcatgacgggtttacaaagtgttgaacaaagtattgcagagaaatttgatggtgtgggtttgcaattgtttagcaacggcactgagcttcatgaagttgccgatcatgaaggcatggatgttgaaagtggagaagaaagtattgaggacgatgaaggaaagagcaagggaagaaccagtttaagaaaaccaagaatttatggtaagccagttcaagaagaagacgcagatattgataatttaccgagtgatgaagaaccttatacaaatgatgacgacgtgcaggactccgaaccaaggatggttgaaatcgatttcaataataccggtgagcagggtgccgaaaaattagctttggaaacagattctgaatttgaagagagtgaagatgagttttcctgggaaagaacagcggcaaacaagctgaagaaaactgaaagtaagaaaaggacctggaatatcggtaagctgatatacatggacaacatttcacctgaagaatgtataagaaggtggaggggcgaggacgacgatagtaaagacgaaagtgacattgaagaagatgttgatgatgacttcttcaggaaaaaagatggtactgttacaaaagagggcaataaagaccatgcagttgatttggaaaagtttgttccatatttcgacactttcgaaaaattggctaaaaaatggaaaagcgttgatgcaatcaaagagcgattcctcggcgcaggcattttaggtaatgataataaaacgaaaagtgactctaatgaaggtggggaagaactatacggcgattttgaagatctagaagatggaaacccttctgaacaagcagaagacaatagtgacaaagaaagtgaggatgaggatgaaaacgaagacactaatggagatgatgataattcattcactaattttgatgcggaggaaaaaaaggacttaaccatggagcaagaaagagaaatgaatgctgcaaagaaggaaaaactacgtgcacaattcgagatagaagaaggtgaaaactttaaagaagatgatgaaaacaatgaatatgatacatggtatgaactacagaaggccaagatatctaaacagttagaaattaacaatatagaatatcaagaaatgactccagaacaacgtcaaagaatcgaaggtttcaaagctggttcttatgtacgtatcgttttcgaaaaagtcccaatggaatttgtcaagaatttcaatccaaaatttccaattgttatgggtggtttattgccgaccgaaataaagttcggtattgtcaaagccaggttgagaagacatcgttggcataagaagattttgaagacaaatgacccactggtcttgtctttgggttggagaaggttccaaactttaccaatttatacaacaactgactctagaacaagaaccagaatgctaaagtatacaccagaacacacatattgtaatgcggctttctacggtcccttatgttctccaaacacacctttttgtggtgttcaaattgttgctaatagtgataccgggaacggttttagaattgcagcaacaggtatcgttgaagagatagacgttaatattgaaattgttaaaaagttaaaattagttgggtttccatataaaattttcaaaaatactgcctttataaaggacatgttttcaagtgctatggaagttgcaaggtttgagggtgcgcagatcaaaactgtctcgggtatccgtggtgaaatcaaaagggcactttcaaagcctgagggtcactatagggcagcctttgaggataaaatcctaatgagtgatattgtaattctaagatcatggtatcctgtccgcgtcaagaaattctataatcctgttacctcactattgttgaaggaaaaaaccgagtggaaaggtttaagattgacaggccaaataagagcggctatgaacctggaaacaccgtcgaatccggacagtgcatatcataaaatagaacgtgtagaaagacacttcaatggtctaaaggtcccaaaagctgttcaaaaggaattgccattcaaatctcagatccatcaaatgaaaccacaaaagaagaaaacatatatggctaaaagagccgtggtgctaggtggtgatgaaaagaaggcaagatcattcattcaaaaagtattgacgatttcgaaagccaaagacagcaagaggaaggaacagaaggctagtcaacgtaaggaaagattgaaaaaattagctaagatggaggaagaaaaatcacaaagggataaggagaaaaagaaagaatacttcgcccagaatggtaaaagaacaactatgggcggtgacgatgaatctcgtccacgtaagatgaggaggtaa

SEQ ID NO: 11010 - DNA, 3552 bp, Artificial Sequence
  Description of Artificial Sequence: Synthetic polynucleotide
atggagcagtctaataaacagcaccgtaaggcgaaggagaagaatacagcaaaaaagaagctccatacgcagggtcataatgcaaaggcctttgccgtggcagccccaggtaagatggcgagaactatgcaaaggtctagtgatgtgaacgaaagaaaattgcatgttcctatggttgatcgtacccctgaagatgatccgcctccatttatcgtcgctgtcgtgggtccacctggaacaggaaagactactttgattagatccctcgtcaggagaatgacaaaaagcactttgaatgatattcaaggtcctattactgttgtctctggtaaacatagaagattaacttttttggagtgccctgcggacgatttgaatgcgatgattgatattgctaagattgccgacttggttcttttattgattgacggtaatttcggttttgaaatggaaacaatggaattcttaaatattgctcaacatcacggtatgccaagagtacttggtgtagctacacatcttgatttatttaaatctcagtctactttgagagcttctaagaaaagattaaagcacagattctggacggaagtttatcaaggtgcaaaattattttacttgtctggtgtgattaatggaaggtatcctgatagagagattttaaacctttctagatttatatctgttatgaaattcagaccattaaaatggaggaacgaacatccctatatgttggctgacagattcacagatttaactcatccggaattaatagagactcaaggattacaaatcgaccgcaaagtcgctatctatggttatttgcacggtactcctttgccttctgctccgggcactagggtgcatattgctggtgttggtgatttcagtgtagcacaaattgaaaaattaccagatccatgtcccacacctttttaccaacagaaattggatgattttgaacgtgaaaaaatgaaagaagaggcaaaggctaacggagaaattacaactgcctctacgacaagaagacgtaaaaggttagatgataaagataaattgatatatgctccaatgtccgatgtcggaggtgtgttgatggataaggatgctgtttatattgatattggaaagaaaaatgaagagccaagttttgttcccggccaagaaagaggtgaaggagaaaaactcatgacgggtttacaaagtgttgaacaaagtattgcagagaaatttgatggtgtgggtttgcaattgtttagcaacggcactgagcttcatgaagttgccgatcatgaaggcatggatgttgaaagtggagaagaaagtattgaggacgatgaaggaaagagcaagggaagaaccagtttaagaaaaccaagaatttatggtaagccagttcaagaagaagacgcagatattgataatttaccgagtgatgaagaaccttatacaaatgatgacgacgtgcaggactccgaaccaaggatggttgaaatcgatttcaataataccggtgagcagggtgccgaaaaattagctttggaaacagattctgaatttgaagagagtgaagatgagttttcctgggaaagaacagcggcaaacaagttgaagaaaactgaaagtaagaaaaggacctggaatatcggtaagttaatatacatggacaacatttctcctgaagaatgtataagaaggtggaggggcgaggacgacgatagtaaagacgaaagtgacattgaagaagatgttgatgatgacttcttcaggaaaaaagatggtactgttacaaaagagggcaataaagaccatgcagttgatttggaaaagtttgttccatatttcgacactttcgaaaaattggctaaaaaatggaaaagcgttgatgcaatcaaagagagattcctcggcgcaggcattttaggtaatgataataaaacgaaaagtgactctaatgaaggtggggaagaattatacggcgattttgaagatttggaagatggaaacccttctgaacaagcagaagacaatagtgacaaagaaagtgaggatgaggatgaaaacgaagacactaatggagatgatgataattctttcactaattttgatgcggaggaaaaaaaggacttaaccatggagcaagaaagagaaatgaatgctgcaaagaaggaaaaattacgtgcacaattcgagatagaagaaggtgaaaactttaaagaagatgatgaaaacaatgaatatgatacatggtatgaattacagaaggccaagatatctaaacagttagaaattaacaatatagaatatcaagaaatgactccagaacaacgtcaaagaatcgaaggtttcaaagctggttcttatgtacgtatcgttttcgaaaaagtcccaatggaatttgtcaagaatttcaatccaaaatttccaattgttatgggtggtttattgccgaccgaaataaagttcggtattgtcaaagccaggttgagaagacatcgttggcataagaagattttgaagacaaatgacccattagtcttgtctttgggttggagaaggttccaaactttaccaatttatacaacaactgactctagaacaagaaccagaatgttgaagtatacaccagaacacacatattgtaatgcggctttctacggtcccttatgttctccaaacacacctttttgtggtgttcaaattgttgctaatagtgataccgggaacggttttagaattgcagcaacaggtatcgttgaagagatagacgttaatattgaaattgttaaaaagttaaaattagttgggtttccatataaaattttcaaaaatactgcctttataaaggacatgttttctagtgctatggaagttgcaaggtttgagggtgcgcagatcaaaactgtctctggtatccgtggtgaaatcaaaagggcactttccaagcctgagggtcactatagggcagcctttgaggataaaatcttgatgagtgatattgtaattttaagaagttggtatcctgtccgcgtcaagaaattctataatcctgttacctctttgttgttgaaggaaaaaaccgagtggaaaggtttaagattgacaggccaaataagagcggctatgaacttggaaacaccgtccaatccggacagtgcatatcataaaatagaacgtgtagaaagacacttcaatggtttgaaggtcccaaaagctgttcaaaaggaattgccattcaaatctcagatccatcaaatgaaaccacaaaagaagaaaacatatatggctaaaagagccgtggtgttgggtggtgatgaaaagaaggcaagatctttcattcaaaaagtattgacgatttccaaagccaaagacagcaagaggaaggaacagaaggctagtcaacgtaaggaaagattgaaaaaattagctaagatggaggaagaaaaatctcaaagggataaggagaaaaagaaagaatacttcgcccagaatggtaaaagaacaactatgggcggtgacgatgaatctcgtccacgtaagatgaggaggtga

SEQ ID NO: 11011 - DNA, 3309 bp, Saccharomyces cerevisiae
atggttctgcttaacagaaggaaaatacaacctaaggaaataggacagtctgctgattccttctctgaaactccatgggtgattaaagaaagtagcgagcgtataaatgattatgacagtgatttaaaaaagctagatttttacaaaagggatatattcacctgtgagattagtggaaaagatggcctttcgtatttcaaggcgttaaaaagcgaagaacagcaccgtgaaaaggtcagatatcttttaccaaaagaactaaggaaggctatagcaaatttcgcaaacttcagtccgataaggaaggtaggacaccttgtagaaagcgcatttcagcgttttagtaaccgtttctttataggcgatacggtgtgcttgaaaactatccaaaaaaatgcattgattacctataaagaaggagagcctaacttggtagaatcaccaactattgaaaacaatgtcacgttgttccttgtcaaggatgtgtttcaatctaacgggatgatggaaagtgaaaagggagaaatttctgccccaaaattgtcactgtatttaatcacagaatgcctgaatcgagaatctaaaggtgcggccctaattgtaggccagaatgaaattaaaaggccagaatcacacttttctaaattcataattgcgtgttttcttaatgaaatactcataaaagtatcgaataaggagcacgcaccatggagggtgaaacaagaatatatagaaagatatgatgtaaaccctaaatgctctcctaatatgattgattatttgccggatagaatgaactcatcttcttccgagctttacactcctcttactataccaccagagagcgatgttgaacctgctgactggaaggaaacgtcggaaacgtcggaaacgtcggaaacgtcactatctaaaataaaagcaattgacgacgagatttcagtctcatttgaccacatttacgataatgtgaactcccttgcctacaatgatttgaagggaaccgtcgacgacaaggagcttccattcactgggccttcgataccatttgaaaatatcagctacttagatagctccttagaatataagaatatcgatcaaaaatggttcaaagagtgcagtcaatttccaacggaacgactattggttgtttatcaattcctgagcttttttggacgttttattggtctatcacattttaattttgatcagttccttactactatcaagtgtactagtccggaggctttagtagatgaatatgtcaaaataaactttcttaaaacttacaacagcaaagggagtttcacaaatgagaagccaagaaacgaaatatataatcaagtgaccagtagtaacgtatcccagcgtgagaaggctaacgtctttaatgcagatgagagtcaacgaatacctagcaatttcaccagaaaccagaaaatgaggaaatttataacggataaaagtactgaatttgtaatgtattccatttttaaagggaagcctctaaaaaatgacgatatggagtttcaatcgtacgaaaaagtgaatatactttacattgatatagtttgctcgttaatgtgtctgatgacggataatgaacctgattggaattgtaatctgatggacaattggactgaagaaaagcgaaaggaggaaggaaataaaacagaaattgatatagctatagaaaagtgtttgaactatggagatactagctgggttaaacttttgcacaataaaaactttagcaacggcaattggttgatctgtctccttggaatcttgcaacagaatacacatatgatagcatatagtgatgtcgcaaaatgtatcacaaaaaaaatactacctttatccatgaattttgtaaatttaggtgatgagctctgggataactttcgcaagagattatctataaaagataaaattgatgttttatgggttctcgtagattttgcgtccaatttctcgagttatattaaggagttggtagataaagtaccaaaactgtgcaatggaatccgcttaaagttggatagtgcaaaaaaagagtatatcaaattgaaacggcaactaaaaacgttaaccaaaaatcgcgtgaagcttcacagcaacgtttcaatgaaccgatatggatcagatgaatgtaaaggtaaggtcaatgcccttaaagtgaaaattgcatacttaatggaagatatcgccttcctagaggcaaaattgattcagagcgatatcaagagactagagattttgggtaaagatagaaatggaaatcgatattattggatggactcaaatggatcgtcatcagccatcagtgaaaaaaatgaggaactttacaactgctgttttttgtgggttcaaggaccctctgaagcggatataaacttttgcttagatgtcgacgtcgaatctttgaaaaaatgggagttgttagctaaagcaaaaggtactgcctacgcgacaaaagaagtcttttcaatatttaggtcgacagacgggtcttactatcaaattgctcaaggtgagaatttcatgataattaattcaaacggtatcttaatgaggccaactattccggcattcatagacaaaaaaattatatcagaaactccagaaaagctcctactctctcatcatcaatgggctttcttcaacgatatagaagatatacatatgttagtagataggttggatgatttaagagaaaatgagggacaattgaagaaagctttgacatccaaaatggaccgtattgaagtatcatacaagcaacagttcaaaattaaaaggcgtattgaatgtgatgaaaccttcaaaaaaaatcacaaacttttgaaaaataacgagttcacgtttcctgaactgaaaagaattgagacaacttgtacatccaacggccaacatttttccaacatggagaaaatttccaaaaaactatcaaggacaaagaatgatctcgttttggaagcgattttaaaagacgtagctcaccttggagaatgtgaaagagcacttctcaaaaagcaacaaaatttgatttatcctttgaattttcatttcgaacaattgaggacgatagacctcgaatttatagttgaaacgaaaagaaaaaggcaagaggatattcttacgaagcttttaaatcatcagaggtataagcatattagtcatgtttcaggctatgggataagttctcaacgagtagataaagctgcacatcttgatgtgcagggtatattagaggagattgaatgtcaacttatttcaagacgacgagaggatgaagaacgcaactag

SEQ ID NO: 11012 - DNA, 3309 bp, Artificial Sequence
  Description of Artificial Sequence: Synthetic polynucleotide
atggttttacttaacagaaggaaaatacaacctaaggaaataggacagtctgctgattccttctctgaaactccatgggtgattaaagaaagtagcgagcgtataaatgattatgacagtgatttaaaaaagttggatttttacaaaagggatatattcacctgtgagattagtggaaaagatggcctttcctatttcaaggcgttaaaaagcgaagaacagcaccgtgaaaaggtcagatatcttttaccaaaagaattgaggaaggctatagcaaatttcgcaaacttcagtccgataaggaaggtaggacaccttgtagaaagcgcatttcagcgttttagtaaccgtttctttataggcgatacggtgtgcttgaaaactatccaaaaaaatgcattgattacctataaagaaggagagcctaacttggtagaatctccaactattgaaaacaatgtcacgttgttccttgtcaaggatgtgtttcaatctaacgggatgatggaaagtgaaaagggagaaatttctgccccaaaattgtctttgtatttaatcacagaatgcttgaatagagaatctaaaggtgcggccttaattgtaggccagaatgaaattaaaaggccagaatctcacttttctaaattcataattgcgtgttttcttaatgaaatactcataaaagtatctaataaggagcacgcaccatggagggtgaaacaagaatatatagaaagatatgatgtaaaccctaaatgctctcctaatatgattgattatttgccggatagaatgaactcttcttcttccgagctttacactcctcttactataccaccagagagcgatgttgaacctgctgactggaaggaaacgagtgaaacgagtgaaacgagtgaaacgtctttatctaaaataaaagcaattgacgacgagatttctgtcagttttgaccacatttacgataatgtgaactcccttgcctacaatgatttgaagggaaccgtcgacgacaaggagcttccattcactgggccttccataccatttgaaaatatcagctacttagatagctccttagaatataagaatatcgatcaaaaatggttcaaagagtgcagtcaatttccaacggaaagattattggttgtttatcaattcttgagcttttttggacgttttattggtttatctcattttaattttgatcagttccttactactatcaagtgtactagtccggaggctttagtagatgaatatgtcaaaataaactttcttaaaacttacaacagcaaagggagtttcacaaatgagaagccaagaaacgaaatatataatcaagtgaccagtagtaacgtatcccagcgtgagaaggctaacgtctttaatgcagatgagagtcaaagaatacctagcaatttcaccagaaaccagaaaatgaggaaatttataacggataaaagtactgaatttgtaatgtattccatttttaaagggaagcctttgaaaaatgacgatatggagtttcaatcttacgaaaaagtgaatatactttacattgatatagtttgctctttaatgtgtttgatgacggataatgaacctgattggaattgtaatttaatggacaattggactgaagaaaagagaaaggaggaaggaaataaaacagaaattgatatagctatagaaaagtgtttgaactatggagatactagctgggttaaacttttgcacaataaaaactttagcaacggcaattggttgatctgtctccttggaatcttgcaacagaatacacatatgatagcatatagtgatgtcgcaaaatgtatcacaaaaaaaatattacctttatccatgaattttgtaaatttaggtgatgagctctgggataactttcgcaagagattatctataaaagataaaattgatgttttatgggttctcgtagattttgcgtccaatttctctagttatattaaggagttggtagataaagtaccaaaattatgcaatggaatccgcttaaagttggatagtgcaaaaaaagagtatatcaaattgaaaagacaattgaaaacgttaaccaaaaatcgcgtgaagcttcacagcaacgtttctatgaacagatatggaagtgatgaatgtaaaggtaaggtcaatgcccttaaagtgaaaattgcatacttaatggaagatatcgccttcttggaggcaaaattgattcagagcgatatcaagagattggagattttgggtaaagatagaaatggaaatagatattattggatggactctaatggaagttcttctgccatcagtgaaaaaaatgaggaactttacaactgctgttttttgtgggttcaaggaccctctgaagcggatataaacttttgcttagatgtcgacgtcgaatctttgaaaaaatgggagttgttagctaaagcaaaaggtactgcctacgcgacaaaagaagtcttttccatatttaggtctacagacgggtcttactatcaaattgctcaaggtgagaatttcatgataattaatagcaacggtatcttaatgaggccaactattccggcattcatagacaaaaaaattatatctgaaactccagaaaagctcttgctctctcatcatcaatgggctttcttcaacgatatagaagatatacatatgttagtagataggttggatgatttaagagaaaatgagggacaattgaagaaagctttgacatccaaaatggaccgtattgaagtatcttacaagcaacagttcaaaattaaaaggcgtattgaatgtgatgaaaccttcaaaaaaaatcacaaacttttgaaaaataacgagttcacgtttcctgaattgaaaagaattgagacaacttgtacatccaacggccaacatttttccaacatggagaaaatttccaaaaaattatctaggacaaagaatgatctcgttttggaagcgattttaaaagacgtagctcaccttggagaatgtgaaagagcacttctcaaaaagcaacaaaatttgatttatcctttgaattttcatttcgaacaattgaggacgatagacctcgaatttatagttgaaacgaaaagaaaaaggcaagaggatattcttacgaagcttttaaatcatcagaggtataagcatattagtcatgtttctggctatgggataagttctcaaagagtagataaagctgcacatcttgatgtgcagggtatattagaggagattgaatgtcaacttatttctagaagaagagaggatgaagaacgcaactga

SEQ ID NO: 11013 - DNA, 1008 bp, Saccharomyces cerevisiae
atgatgtcagtcaatagatttacttcaggtcgactccctgttttccttagaaagtcccctttttactactcgagagcttatttgcatcaaacatgtgttttcaagcaaaataaagaaactgcacaagattcgccagagcttttagcaaaaagctcacatctgaattcgaaaccactagatgtaagcaataaagcaccagtgaaaactgctcagaataaaattcctctagctcatagtaaatatgaatcgtcaaagtacgaacttcccaaatggaaagaagccttgggtgaactagtaattcgagcatttcatttagatatggatagagtgagggcagggcccgttgcaggatcttactattataaaatttgtaaagagcaaggtttacaatacgaggacgagccattatcagaaactgctaaatacttttacgaggatttgaagctaccacgtactttttcacaatggtttcaaatcactgtattgcacgagtggatactttttgtacgtatgagagccatgcctttcaaatacggcagaaactatcagcagaaattggtagatagaacattttctgacattgagctgagattattcgaggaaatgaaagttaattctggtagaatcgcagatcaatatttgaaagatttcaatacgcaattaagaggagcgatatttgcatatgatgaaggatttgctacagatgatggtacacttgcgacagctgtctggagaaatctttttggtggaagaaagaacattgatatggttcatttagagtctgttgtgagatacatttattctcaactatatgttctaagcaggttatcagacagagagtttgccacaggtaaattcaagtttgttcctcctggggtgaaggtcgaaaaactgacaccaaagcaagaggaagagttgaaggccaagaccattgcaaaatatgaagctctagacaaggatcctaaaaccttaccaagcgagagaagtaggctgtcatatacaaactaa

SEQ ID NO: 11014 - DNA, 1008 bp, Artificial Sequence
  Description of Artificial Sequence: Synthetic polynucleotide
atgatgtctgtcaatagatttacttctggtagactccctgttttccttagaaagtcccctttttactactctagagcttatttgcatcaaacatgtgttttcaagcaaaataaagaaactgcacaagattctccagagcttttagcaaaaagctctcatttgaattctaaaccattagatgtaagcaataaagcaccagtgaaaactgctcagaataaaattcctttggctcatagtaaatatgaatcttccaagtacgaacttcccaaatggaaagaagccttgggtgaattggtaattagagcatttcatttagatatggatagagtgagggcagggcccgttgcaggatcttactattataaaatttgtaaagagcaaggtttacaatacgaggacgagccattatctgaaactgctaaatacttttacgaggatttgaagttaccacgtactttttctcaatggtttcaaatcactgtattgcacgagtggatactttttgtacgtatgagagccatgcctttcaaatacggcagaaactatcagcagaaattggtagatagaacattttctgacattgagttaagattattcgaggaaatgaaagttaattctggtagaatcgcagatcaatatttgaaagatttcaatacgcaattaagaggagcgatatttgcatatgatgaaggatttgctacagatgatggtacacttgcgacagctgtctggagaaatctttttggtggaagaaagaacattgatatggttcatttagagtctgttgtgagatacatttattctcaattatatgttttaagcaggttaagtgacagagagtttgccacaggtaaattcaagtttgttcctcctggggtgaaggtcgaaaaattaacaccaaagcaagaggaagagttgaaggccaagaccattgcaaaatatgaagctttggacaaggatcctaaaaccttaccaagcgagagaagtaggttatcttatacaaactga

SEQ ID NO: 11015 - DNA, 1623 bp, Saccharomyces cerevisiae
atggtatttactaaggaagaagttgattactcattatatctggttacagattctaccatgcttccaccgggaactactttatgttctcaggttgaagctgggttgaaaaatggtgtaacgctagttcaaatccgtgaaaaggatattgaaacaaaaaatttcgttgcagaggctttagaagttcaaaaaatatgtaagaagtacaatgttccacttattatcaatgaccgtatagacgtcgctatggcaattgacgccgatggggttcatgtgggccaggacgatatgccaatcccaatggtaagaaaacttttgggcccttctaaaattcttggatggagtgttggtaaaccttcggaggtagagacattggctaaatgggggccagatatggtagattatattggtgttggtactcttttccctacatcaacaaagaaaaatcctaagaaatcacccatgggtcctcaaggcgccattgccattttggatgctttggaggaatttaaagctacatggtgtagaaccgttggtattggtggtcttcatcctgacaatattcaacgtgtgctttgtcaatgtgttgcttcaaatggaaagagatcgttggatggtatctctctagtcagcgatattatggccgctccagatgcatgtgcagcaaccaagaggttgagaggcttgttagatgctaccagataccaatttgttgagtgcgagttaaataatacatttccgaccacaacttcaattcaaaacgttatatctcaagtatcaaacaatcgtccattagtgcaacatatcaccaataaggttcatcaaaattttggtgccaatgtcactctagctttaggctcatctcctatcatgtctgaaattgaaagtgaagtatctgaactagcaagaatcccaaatgcttctttactgttaaataccggatcagtggcacctattgaaatgctaaaagccgcaattaatgcttataatgaagtaaatagacccatcacctttgacccggtcgggtacagcgccactgaaacaaggctctgtctaaacaacactttgctcacttacggccaatttgcttgtataaagggcaattgcagtgaaatactgtctctagccaagttaaataaccataaaatgaagggcgtcgactctagcagcggcaaaacgaacatcgacacacttgtgcgcgctacacaaattgtggcattccaatacaggactgttgctgtttgcacgggtgagtttgattgcgttgctgatggtacttttggaggcgaatacaaactttcatcaggaacagaaggaataaccgctgaagatcttccatgtgtaataattgaagatggcccaattcctatcatgggtgacatcactgcaagtggatgttcacttggttctacaattgcttcctttatcggtgggttagattccactggaaaactgtttgatgctgtggttggtgctgtcctattatacaaatcagctggtaagttggcttccacccgttgtcaaggaagtggttcattccatgtcgaattgattgacgcattatatcaattattccatgaaaataaaccagaaaagtggtccgcttctttgaagaaattcaaataa

SEQ ID NO: 11016 - DNA, 1623 bp, Artificial Sequence
  Description of Artificial Sequence: Synthetic polynucleotide
atggtatttactaaggaagaagttgattactctttatatttggttacagattctaccatgcttccaccgggaactactttatgttctcaggttgaagctgggttgaaaaatggtgtaacgttagttcaaatccgtgaaaaggatattgaaacaaaaaatttcgttgcagaggctttagaagttcaaaaaatatgtaagaagtacaatgttccacttattatcaatgaccgtatagacgtcgctatggcaattgacgccgatggggttcatgtgggccaggacgatatgccaatcccaatggtaagaaaacttttgggcccttctaaaattcttggatggagtgttggtaaaccttctgaggtagagacattggctaaatgggggccagatatggtagattatattggtgttggtactcttttccctacatctacaaagaaaaatcctaagaaaagtcccatgggtcctcaaggcgccattgccattttggatgctttggaggaatttaaagctacatggtgtagaaccgttggtattggtggtcttcatcctgacaatattcaacgtgtgctttgtcaatgtgttgcttctaatggaaagagaagtttggatggtatctctttggtcagcgatattatggccgctccagatgcatgtgcagcaaccaagaggttgagaggcttgttagatgctaccagataccaatttgttgagtgcgagttaaataatacatttccgaccacaacttctattcaaaacgttatatctcaagtatccaacaatcgtccattagtgcaacatatcaccaataaggttcatcaaaattttggtgccaatgtcactttggctttaggctcttctcctatcatgtctgaaattgaaagtgaagtatctgaattggcaagaatcccaaatgcttctttattattaaataccggatctgtggcacctattgaaatgttgaaagccgcaattaatgcttataatgaagtaaatagacccatcacctttgacccggtcgggtacagcgccactgaaacaaggctctgtttgaacaacactttgctcacttacggccaatttgcttgtataaagggcaattgcagtgaaatattatctttggccaagttaaataaccataaaatgaagggcgtcgactctagcagcggcaaaacgaacatcgacacacttgtgcgcgctacacaaattgtggcattccaatacaggactgttgctgtttgcacgggtgagtttgattgcgttgctgatggtacttttggaggcgaatacaaactttcttctggaacagaaggaataaccgctgaagatcttccatgtgtaataattgaagatggcccaattcctatcatgggtgacatcactgcaagtggatgttctcttggttctacaattgcttcctttatcggtgggttagattccactggaaaattatttgatgctgtggttggtgctgtccttttatacaaatctgctggtaagttggcttccacccgttgtcaaggaagtggttctttccatgtcgaattgattgacgcattatatcaattattccatgaaaataaaccagaaaagtggtccgcttctttgaagaaattcaaatga

SEQ ID NO: 11017 - DNA, 717 bp, Saccharomyces cerevisiae
atgaagttcacccctagcatagttattgatgctccgcaatattatgttgatcattttaatggcaagtataacgtggataaatgtgttattttaagagacctgcagctagaaacggattcagaatccatgccatccagcttaaagcatttgaccaaacctacgcacatcttggatttgacaaacaatgaccttatcatgattccagatctatcaagaagagacgatatacatacattactgttgggccgaaacaatatcgttgaagtagacggtcgcctattgcctatgaatgtacagaaccttacattatcgaataacagcataagaaggtttgaagatcttcaaaggttgcgtagagcgcccaggacgttgaagaatctaactttaatagggaatcaagtatgtcatttagccaattatagagaacatgtacttcgattagtaccgcatttagagactttagactttcaaaacgtaacagctgaggaaagaaagagcgcaatgagctttccaaggcaggcggacggcgatacgttgggcccagtaaatactgcaataagagataatggatccagagataaaacgatggagatcatgaatttggtggtgagtaagatgacagtagagagaagaaatgaattgaaaaagcagttagcagaagctacttctttagaagagattgccaggctggaaaaactactctctggtggtgtttaa

SEQ ID NO: 11018 - DNA, 717 bp, Artificial Sequence
  Description of Artificial Sequence: Synthetic polynucleotide
atgaagttcacccctagcatagttattgatgctccgcaatattatgttgatcattttaatggcaagtataacgtggataaatgtgttattttaagagacttacagttagaaacggattctgaatccatgccatccagcttaaagcatttgaccaaacctacgcacatcttggatttgacaaacaatgaccttatcatgattccagatttatctagaagagacgatatacatacattattattgggcagaaacaatatcgttgaagtagacggtcgcttgttgcctatgaatgtacagaaccttacattatccaataacagcataagaaggtttgaagatcttcaaaggttgcgtagagcgcccaggacgttgaagaatttaactttaatagggaatcaagtatgtcatttagccaattatagagaacatgtacttcgtttagtaccgcatttagagactttagactttcaaaacgtaacagctgaggaaagaaagagcgcaatgagctttccaaggcaggcggacggcgatacgttgggcccagtaaatactgcaataagagataatggatccagagataaaacgatggagatcatgaatttggtggtgagtaagatgacagtagagagaagaaatgaattgaaaaagcagttagcagaagctacttctttagaagagattgccaggttagaaaaattactctctggtggtgtttga

SEQ ID NO: 11019 - DNA, 1635 bp, Saccharomyces cerevisiae
atgtctgaagagaatttgaggcctgcctatgacgatcaagttaatgaggatgtctacaagagaggcgctcagagcaaattgaccaaagctcgtaaggcagacttcgacgatgaaaaggacaaaaaaaaggataatgacaaacacatagataaaagaccaaaaagcggtcctcgtttggatgaaaatggcaatccacttcccaaggagcctcgtctcccaaagagaaaggtggctgttatggttggttactgtggtactggctaccatggtatgcaatataatccaccaaatccaaccatcgagtctgccctattcaaagcatttgttgaagcaggtgctatttccaaggacaactccaacgatttgaaaaagaatggattcatgagagctgcaagaactgataagggtgtccatgctggaggtaatttaatatcattgaaaatgattattgaagatcctgatatcaagcagaagatcaacgaaaagttaccggaagggataagggtatgggatatcgagcgtgtgaacaaggcgtttgattgtagaaaaatgtgcagttcacgttggtacgaatacttattaccaacttattcactcattggccccaaacctggttctatactttatagagacatcgaagaaagtaaaacagaattacctggtgtattagatgaagatttggaatccaaagaattttgggaagagtttaaaaaagatgcgaatgaaaaattttcaacagaagaaatcgaagctatattagcatatgttccgcccgcaagagatgaatttgatataaatgaagaactataccagaaggtaaaaaagtacaagcaattagaaaatgctcaccgtagaagatatcgtatatccgcggcaaaactggccaaattccgtgcttctacaagtcaataccttggcgctcataacttccataattttacattaggcaaggacttcaaagaaccaagtgccattcgatttatgaaagatataaaagtatctgatccatttgttattggcgatgcccaaacagaatggatttccatcaagattcacggccagtctttcatgctacatcaaattcgtaagatggtatcaatggcaaccttaattacccgttgtggttgccccgtcgaacgcattagtcaggcttacggacagcagaagattaatattccgaaggcacctgcattaggattattgttagaagctccagtatttgaaggttataataaaagactagaacagtttggttacaaggcgatcgatttttccaaatatcaagacgaagtggataagttcaaaatgaagcatatctacgataagatctacaaggaagaggtggacgaaaatgtttttaatgcgttctttagttatattgatagtttcaacaaggttactggagcacagggagaagaaactgccgataaatcgggacctgctgtgcaaaagagtatcttcgaattcttgacagctaagggtatcccaggtcttactgatgcgcccgagagcaataagaagattaagcaaagaaaaagaatggaagaggaggaagctgctagtaaaaaggctgaaatatccagcaccactcagagcaacgaacctgaagtacaaccggaagcggcagctaattag

SEQ ID NO: 11020 - DNA, 1635 bp, Artificial Sequence
  Description of Artificial Sequence: Synthetic polynucleotide
atgtctgaagagaatttgaggcctgcctatgacgatcaagttaatgaggatgtctacaagagaggcgctcagagcaaattgaccaaagctcgtaaggcagacttcgacgatgaaaaggacaaaaaaaaggataatgacaaacacatagataaaagaccaaaaagcggtcctcgtttggatgaaaatggcaatccacttcccaaggagcctcgtctcccaaagagaaaggtggctgttatggttggttactgtggtactggctaccatggtatgcaatataatccaccaaatccaaccatcgagtctgcccttttcaaagcatttgttgaagcaggtgctatttccaaggacaactccaacgatttgaaaaagaatggattcatgagagctgcaagaactgataagggtgtccatgctggaggtaatttaatatctttgaaaatgattattgaagatcctgatatcaagcagaagatcaacgaaaagttaccggaagggataagggtatgggatatcgagcgtgtgaacaaggcgtttgattgtagaaaaatgtgcagttctcgttggtacgaatacttattaccaacttattccctcattggccccaaacctggttctatactttatagagacatcgaagaaagtaaaacagaattacctggtgtattagatgaagatttggaatccaaagaattttgggaagagtttaaaaaagatgcgaatgaaaaattttctacagaagaaatcgaagctatattagcatatgttccgcccgcaagagatgaatttgatataaatgaagaattataccagaaggtaaaaaagtacaagcaattagaaaatgctcaccgtagaagatatcgtatatccgcggcaaaattggccaaattccgtgcttctacaagtcaataccttggcgctcataacttccataattttacattaggcaaggacttcaaagaaccaagtgccattagatttatgaaagatataaaagtatctgatccatttgttattggcgatgcccaaacagaatggatttccatcaagattcacggccagtctttcatgttgcatcaaattcgtaagatggtatctatggcaaccttaattacccgttgtggttgccccgtcgaacgcattagtcaggcttacggacagcagaagattaatattccgaaggcacctgcattaggattattgttagaagctccagtatttgaaggttataataaaagattagaacagtttggttacaaggcgatcgatttttccaaatatcaagacgaagtggataagttcaaaatgaagcatatctacgataagatctacaaggaagaggtggacgaaaatgtttttaatgcgttctttagttatattgatagtttcaacaaggttactggagcacagggagaagaaactgccgataaaagtggacctgctgtgcaaaagagtatcttcgaattcttgacagctaagggtatcccaggtcttactgatgcgcccgagagcaataagaagattaagcaaagaaaaagaatggaagaggaggaagctgctagtaaaaaggctgaaatatccagcaccactcagagcaacgaacctgaagtacaaccggaagcggcagctaattga

SEQ ID NO: 11021 - DNA, 546 bp, Saccharomyces cerevisiae
atgagacagctaacagaagaagagaccaaggttgttttcgaaaaactcgccggctatattggtagaaatatttcttttttagtggataataaagaacttcctcatgtcttcagattacaaaaggatagagtatattacgtacccgatcatgttgcaaaattggctactagtgtagcaagacctaacttgatgtctctgggtatttgtttaggtaaattcacgaaaactggaaaattcaggttacatattacttctttgacagtattggctaagcatgccaaatataagatatggattaaacctaatggggagatgccattcttatacggtaatcatgtgttaaaggcacatgtgggtaaaatgtctgatgatataccagaacacgccggtgttattgtgtttgcaatgaatgatgtgccattagggttcggtgtcagtgcgaaaagtacttctgagtcaagaaacatgcaacccactggtatagttgctttcagacaagcagatattggtgagtatttgagagatgaagacaccttgtttacttag

SEQ ID NO: 11022 - DNA, 546 bp, Artificial Sequence
  Description of Artificial Sequence: Synthetic polynucleotide
atgagacagttgacagaagaagagaccaaggttgttttcgaaaaactcgccggctatattggtagaaatatttcttttttagtggataataaagaacttcctcatgtcttcagattacaaaaggatagagtatattacgtacccgatcatgttgcaaaattggctactagtgtagcaagacctaacttgatgtctttgggtatttgtttaggtaaattcacgaaaactggaaaattcaggttacatattacttctttgacagtattggctaagcatgccaaatataagatatggattaaacctaatggggagatgccattcttatacggtaatcatgtgttaaaggcacatgtgggtaaaatgtctgatgatataccagaacacgccggtgttattgtgtttgcaatgaatgatgtgccattagggttcggtgtcagtgcgaaaagtacttctgagagcagaaacatgcaacccactggtatagttgctttcagacaagcagatattggtgagtatttgagagatgaagacaccttgtttacttga

SEQ ID NO: 11023 - DNA, 1923 bp, Saccharomyces cerevisiae
atggctaaagataatttaactaatttgctctctcaattgaacattcaattgtctcaagacgagcattcgcaggtcgaacagacttgcgtgaaactattggattctggatgtgagaatccagcggatgtatttagacgttgcttagtagctgttatccaacaggacaagtatcaaaaggctttacattatttaaaaaaattcaaacatatagatgacaagtacggtcgcaaatttgcgctagaaaaattgtacattttctataaattgaatatgccagatgaattcaacacattgtacacagcaattatcacagatgatctcgatacggtactaaaaaaggatatcgagtcacttagaggtatcctacatgtgagagctcaatattgttataaaaatgggctgtaccaagaagcttttaaaatatatcaacatttagcaagtcacaatgagaaggatcaggatagtcaaattgaactctcttgtaacgaaagggttccgctatccgttgcgacagagttaatgaacagatcacccttagttactcctatggatgaatcttcctacgatttattattcaatgaatcattcatcatggcatccgtaggtaaatatgacaaggctatcgaactattagaaaaagcgcttcaaggagccacgaatgaaggctatcaaaacgatattaatactattaaattgcaattatcatttgttttgcaaatggtggggaaaactgcacaaagtaaagaaatcttaaagggcttattgcaggaactgaaagccgattctccattctctttaatttgtcaaaataacctaaatgcgtttgttgatttctctaaatacaatacaaacttcaatttactgttaagggaattaaacgtagaaaaactaaacacttttaatttacaaaccttcacccatgaacaatggtcaaacattcaacgcaatgtacttttcctgcgtttgttcaacaatgtcaaaattcactctcaagagtcccttttatcaagaacgttcgataaatactctaagttagttgacaatgttactttggaaagctacaagacgcaggccaagaaactttaccaccacactacaaaaaccattttaagtggaacagatggaagtacgattggaatattactactgactatccaattgctaataatagagaaggaatgggaaaatgctatcagaataggagaattatttttaaatgaaagctggaaatcgtcctttgaaaaattcaacgattcacaagccatcgtgtgttacattttatttgaattatacaagattaagggaagaaacaactccaaaagtgttctgcttaaaaaattaggctccgtgagagtccaattgagcggaaaaatccaagaaaacataccattttggaaacacgtcgggtttgaattattgtccatgggtaatgctaaagaatcgaaggctttactcagagagatttcaaactttagtaaaggcgatgcagatgtccttgttgacagagttgtttcgtcagattctttggatatagcacaaggtatagatctagtgagagatattgatattgataaattaattcaacttggtgtgaaacccttagaatcgtcagcaaagagaagtaaaaacaccgcagttagcaaagttcaaaagagaaaagttttagagctaaagaagaaaagaaagattaaacgcctcgaaaaatttttacaaggtcgcgacacctccaaattacctgatcctgaaaggtggctgccattaagagacaggtctacttataggccaaagaaaaaacaacaaggtgcaaaacaaactcaaggtggtgctatgaacaaaaaatcagaacaggcccttgacatatcaaagaaagggaagcccactgttaataaaaagcctaagaacaagaagaagggccgtaaatag

SEQ ID NO: 11024 - DNA, 1923 bp, Artificial Sequence
  Description of Artificial Sequence: Synthetic polynucleotide
atggctaaagataatttaactaatttgctctctcaattgaacattcaattgtctcaagacgagcattctcaggtcgaacagacttgcgtgaaacttttggattctggatgtgagaatccagcggatgtatttagacgttgcttagtagctgttatccaacaggacaagtatcaaaaggctttacattatttaaaaaaattcaaacatatagatgacaagtacggtcgcaaatttgcgttagaaaaattgtacattttctataaattgaatatgccagatgaattcaacacattgtacacagcaattatcacagatgatctcgatacggtattgaaaaaggatatcgagtctcttagaggtatcttgcatgtgagagctcaatattgttataaaaatgggttataccaagaagcttttaaaatatatcaacatttagcaagtcacaatgagaaggatcaggatagtcaaattgaactctcttgtaacgaaagggttccgttatccgttgcgacagagttaatgaacagatctcccttagttactcctatggatgaatcttcctacgatttattattcaatgaatctttcatcatggcatccgtaggtaaatatgacaaggctatcgaattattagaaaaagcgcttcaaggagccacgaatgaaggctatcaaaacgatattaatactattaaattgcaattatcttttgttttgcaaatggtggggaaaactgcacaaagtaaagaaatcttaaagggcttattgcaggaattgaaagccgattctccattctctttaatttgtcaaaataacttgaatgcgtttgttgatttctctaaatacaatacaaacttcaatttattattaagggaattaaacgtagaaaaattgaacacttttaatttacaaaccttcacccatgaacaatggagcaacattcaacgcaatgtacttttcttgcgtttgttcaacaatgtcaaaattcactctcaagagtcccttttatctagaacgttcgataaatactctaagttagttgacaatgttactttggaaagctacaagacgcaggccaagaaactttaccaccacactacaaaaaccattttaagtggaacagatggaagtacgattggaatattattattaactatccaattgttaataatagagaaggaatgggaaaatgctatcagaataggagaattatttttaaatgaaagctggaaatcttcctttgaaaaattcaacgattctcaagccatcgtgtgttacattttatttgaattatacaagattaagggaagaaacaactccaaaagtgttttacttaaaaaattaggctccgtgagagtccaattgagcggaaaaatccaagaaaacataccattttggaaacacgtcgggtttgaattattgtccatgggtaatgctaaagaatccaaggctttactcagagagatttccaactttagtaaaggcgatgcagatgtccttgttgacagagttgtttcttctgattctttggatatagcacaaggtatagatttggtgagagatattgatattgataaattaattcaacttggtgtgaaacccttagaatcttctgcaaagagaagtaaaaacaccgcagttagcaaagttcaaaagagaaaagttttagagttgaagaagaaaagaaagattaaacgcctcgaaaaatttttacaaggtcgcgacacctccaaattacctgatcctgaaaggtggttaccattaagagacaggtctacttataggccaaagaaaaaacaacaaggtgcaaaacaaactcaaggtggtgctatgaacaaaaaaagtgaacaggcccttgacatatccaagaaagggaagcccactgttaataaaaagcctaagaacaagaagaagggccgtaaatga

SEQ ID NO: 11025 - DNA, 1104 bp, Saccharomyces cerevisiae
atgcaacgcaatagtttagtaaatatcaaactaaacgctaattcgccatcgaaaaagaccacaacaagaccaaatacgtccaggatcaataaaccatggagaatatcccattcgccgcagcaaagaaacccgaattcaaaaataccttcacctgtaagagaaaaattgaacagattacctgtaaacaataagaagtttttggatatggaaagctccaaaattccatcacctataaggaaagcgacttcttccaaaatgatacacgaaaataagaagctacctaaatttaaatccctatcactcgatgactttgaactggggaagaaattaggaaagggtaaattcggtaaagtttattgcgttcggcacaggagtacaggatatatttgcgcactgaaagtaatggagaaggaagaaataataaagtataatttacagaaacaattcagaagggaggtagaaatacaaacatcgctaaatcatccgaatctaactaaatcatacggctattttcatgatgaaaaaagagtgtacctgctaatggaatacttagtcaatggggaaatgtataaactattgaggttacacggacccttcaacgatattttagcatcagattatatttatcaaattgccaatgccctagattatatgcataaaaagaatattattcatagagatattaaacctgaaaatatactaatagggttcaataatgtcattaagttaacggacttcggatggagtataataaatccgccagaaaatagaaggaaaactgtctgtgggacaattgactacctttctccagaaatggtggagtcaagggaatatgatcacactatagatgcatgggctcttggcgtcctggcgtttgaactactgaccggtgcccctccgttcgaagaagaaatgaaagatactacatataaaaggatagcagcactggatatcaaaatgcccagtaacatttctcaggatgcgcaagatttaatacttaaactactaaaatacgaccccaaagatagaatgcgccttggagacgtaaaaatgcatccttggatactaagaaacaagcccttttgggaaaataagcggttatag

SEQ ID NO: 11026 - DNA, 1104 bp, Artificial Sequence
  Description of Artificial Sequence: Synthetic polynucleotide
atgcaacgcaatagtttagtaaatatcaaattgaacgctaattctccatctaaaaagaccacaacaagaccaaatacgtccaggatcaataaaccatggagaatatcccattctccgcagcaaagaaacccgaattctaaaataccttctcctgtaagagaaaaattgaacagattacctgtaaacaataagaagtttttggatatggaaagctccaaaattccatctcctataaggaaagcgacttcttccaaaatgatacacgaaaataagaagttacctaaatttaaatccttatctctcgatgactttgaattggggaagaaattaggaaagggtaaattcggtaaagtttattgcgttcgtcacaggagtacaggatatatttgcgcattgaaagtaatggagaaggaagaaataataaagtataatttacagaaacaattcagaagggaggtagaaatacaaacatctttgaatcatccgaatttaactaaatcttacggctattttcatgatgaaaaaagagtgtacttgttgatggaatacttagtcaatggggaaatgtataaacttttgaggttacacggacccttcaacgatattttagcatctgattatatttatcaaattgccaatgccttggattatatgcataaaaagaatattattcatagagatattaaacctgaaaatatattaatagggttcaataatgtcattaagttaacggacttcggatggagtataataaatccgccagaaaatagaaggaaaactgtctgtgggacaattgactacctttctccagaaatggtggagtccagggaatatgatcacactatagatgcatgggctcttggcgtcttggcgtttgaattattaaccggtgcccctccgttcgaagaagaaatgaaagatactacatataaaaggatagcagcattggatatcaaaatgcccagtaacatttctcaggatgcgcaagatttaatacttaaattattgaaatacgaccccaaagatagaatgcgccttggagacgtaaaaatgcatccttggatattaagaaacaagcccttttgggaaaataagagattatga

SEQ ID NO: 11027 - DNA, 1752 bp, Saccharomyces cerevisiae
atgtcatcagatgcgttaaaagcactacttcagtggggtgcgtcatttggtgtaatagtgccagaggaactcaagtttttatataccgatcttaagggcattatttgcgtatgtgaaaaagatatagacaatcccagcatcaagattcctcccgagattgtcatttcaaggaatctgcccatgaagttttttgggctaagtgaatccactaagaatatcaacggatggctgaagttgttcttcgcaaaaataaaatttgatagggataatgatactatcgtggacaatgttcgtgtgaatgataaatttaaaccttacttggatgcattgccttcccgcctaaattcgcccttggtctggaacccaagcgagttgaagcgtttatcatctacaaacatagggaattcgattcatgaaaagttcgaaggtatatttaaagagtggtttgaactggtcagttcttcagatatgtttgacttggaaagagtggcagatgatgtgcagaccttccataatctcgatgagttgacatatgaggctttgtatgagaagattttgaagataacagaacttcaaagaccaactatctggtattcttttcctgcatttttatggtcgcaccttatattcatttcaagagcattccctgaatatgtgctaaacagaaactgtcctgacaactctattgtactgcttcccatcgtcgatcttctaaatcatgactaccgttccaaagtcaaatggtatcctgaaaatgggtggttctgttatgaaaaaatcggtaccgcctcccaatcacgagaactatcaaataattatggcggtaagggaaatgaggagttactctctggatatggatttgttttagaagacaacatatttgactcagtggctttgaaagttaaattgccattagatgtggtatctacaattcttgaaacagaacctagtttgaagctgcccttactttcggattacaccacttatgcttttgaaaacaaagactgtgtccagcaagaaaagaaggctactcgtagtgctacagactacatcaatggggtgacttacttcattaacatacaaaatgaacaatgtttagaaccattactggatctttttacctacctttctaaggccgaagaggaggatctacacgatttgagagcccgtttgcagggtatacaaatgctacgaaatgcattgcagagcaaactcaacagcattactggaccacctgcaactgatgactcttatgcaattgatccttacagagtctattgtgctgacgtttatactaaaggtcaaaaacaaattttaaaagaggctttaacgaggttgaaaaaactagaaaaaacaatgctgtcagagaacaagcaccaattgctaaccatgagcaaaattcttaagaatgaccctgcttttgcagaaactgaattaccttcgctgttcagcaacgaagatggtgaagaggtcatctttgaatctacttatgatttattgatactttggattctactgaaaacgaaaaagaattcttaccccaccaaatatgaatgggttggacagcagtatactaatttcaagcaaactgcatatatttcagatgatgccaaggctttccatactgcatacttcgagaagcaagacgatgtggatttggccgaagtagatcatgcgattcagtttgtagtagacaattcctttaccagaacttcatctacaaccgaagagactattttagtacgtaagtag

SEQ ID NO: 11028 - DNA, 1752 bp, Artificial Sequence
  Description of Artificial Sequence: Synthetic polynucleotide
atgtcttctgatgcgttaaaagcattacttcagtggggtgcgtcttttggtgtaatagtgccagaggaactcaagtttttatataccgatcttaagggcattatttgcgtatgtgaaaaagatatagacaatcccagcatcaagattcctcccgagattgtcatttctaggaatttgcccatgaagttttttgggttgagtgaatccactaagaatatcaacggatggttaaagttgttcttcgcaaaaataaaatttgatagggataatgatactatcgtggacaatgttcgtgtgaatgataaatttaaaccttacttggatgcattgccttcccgcttgaattctcccttggtctggaacccaagcgagttgaagcgtttatcttctacaaacatagggaattctattcatgaaaagttcgaaggtatatttaaagagtggtttgaattggtcagttcttctgatatgtttgacttggaaagagtggcagatgatgtgcagaccttccataatctcgatgagttgacatatgaggctttgtatgagaagattttgaagataacagaacttcaaagaccaactatctggtattcttttcctgcatttttatggtctcaccttatattcatttctagagcattccctgaatatgtgttgaacagaaactgtcctgacaactctattgtattgcttcccatcgtcgatcttttgaatcatgactaccgttccaaagtcaaatggtatcctgaaaatgggtggttctgttatgaaaaaatcggtaccgcctcccaatctagagaattatccaataattatggcggtaagggaaatgaggagttactctctggatatggatttgttttagaagacaacatatttgactctgtggctttgaaagttaaattgccattagatgtggtatctacaattcttgaaacagaacctagtttgaagttgcccttactttctgattacaccacttatgcttttgaaaacaaagactgtgtccagcaagaaaagaaggctactcgtagtgctacagactacatcaatggggtgacttacttcattaacatacaaaatgaacaatgtttagaaccattattagatctttttacctacctttctaaggccgaagaggaggatttacacgatttgagagcccgtttgcagggtatacaaatgttaagaaatgcattgcagagcaaactcaacagcattactggaccacctgcaactgatgactcttatgcaattgatccttacagagtctattgtgctgacgtttatactaaaggtcaaaaacaaattttaaaagaggctttaacgaggttgaaaaaattagaaaaaacaatgctttctgagaacaagcaccaattgttgaccatgagcaaaattcttaagaatgaccctgcttttgcagaaactgaattaccttctttattcagcaacgaagatggtgaagaggtcatctttgaatctacttatgatttattgatactttggattttattgaaaacgaaaaagaattcttaccccaccaaatatgaatgggttggacagcagtatactaatttcaagcaaactgcatatatttctgatgatgccaaggctttccatactgcatacttcgagaagcaagacgatgtggatttggccgaagtagatcatgcgattcagtttgtagtagacaattcctttaccagaacttcttctacaaccgaagagactattttagtacgtaagtga

SEQ ID NO: 11029 - DNA, 2433 bp, Saccharomyces cerevisiae
atggatggttttcgtgtagctggtgcgttagtagttggtgcgttaaccgctgcatatttatattttggcggaaggttttcgatagcgctggtcattatagtaggttatggtatttattgcaatgaagccagcggtggtagtcaagatagtcaagagaagctcgatttgaacaaacaacagaaaaagccatgttgcagtgataagaagattgcggatggaggaaaaaaaactggcggatgttgttctgataagaagaacggtggtggtaaaggtggaggatgctgttcctcaaaaggtggaaagaaaggggggtgttgttcatctaaaggtggaaagaaaggaggatgttgttcctctaaaaagaatattggtgacaatgaaaatactgccactgaagttgagaaagccgtaaattaccctgttactgtggattttacagaagtttttaggaagcccactaagaaaaggtcgagtacccccaaggttttttcgaaaaatagctcgtctaactctagagtaggtaaaaaattaagtgtttcaaagaagataggtccagatggattgatcaagagcgcgttgactatttcgaatgaaacgcttttgagttcacagatctatgtgttatatagttccctgcaaggtgcagcttcgaaagctgcaaagagcgtttacgacaaactaaaggaattggatgaattgactaatgagccaaaacttttgaaccttgacgatctatccgatttcgatgactattttataaatgttcccgttgaaaatgcattgtatgtgcttgttttaccgtcttatgatatcgattgccctctagattatttcttacaaactcttgaagagaatgcgaatgattttagagtagatagtttcccattacgaaaattggttggctacacagttttggggcttggtgattcagaatcatggcctgaaaagttttgttatcaagccaaaagggccgatcactggatttctcgtttaggtggcaggagaattttccccttaggcaaagtttgtatgaaaacaggaggtagtgccaaaatcgatgagtggacatcattgttagcagagactttgaaagatgatgaaccaattatttatgagtatgatgaaaacgcagactctgaggaagatgaagaagaaggtaatggtagtgatgaattaggcgatgtagaagatattggtggtaagggtagtaatggaaagttttcaggcgcagatgaaatcaaacaaatggtggcgaaagacagtccaacgtacaagaacttgacaaagcaaggttacaaagttattggttcccattcaggcgttaagatctgccgatggactaagaatgaactacgtggtaaagggtcttgttataaaaaatcgctcttcaatatcgcgtccagtagatgcatggaattgactccttctttggcatgttcatccaaatgcgttttctgttggaggcatggtacaaatcccgtgtcaaaaaactggagatgggaagtagatgaaccagaatacattctagaaaatgctctgaagggacactattccatgatcaaacagatgagaggtgtgcccggtgttattgcagaaagatttgcgaaagcgtttgaagttcgtcattgtgccttgtctcttgtcggcgagcctattctttatcctcatatcaataaatttatccaattattacaccaaaagggcataactagtttccttgtgtgcaatgcccaacatccagaggccttgagaaatattgttaaagtaacacaattatatgtttctattgacgcacccaccaagacagagctgaaaaaagtggatagacctttgtacaaagatttctgggagagaatggtagaatgcttagagattttgaaaactgtacaaaaccatcaaaggacagttttcaggttaactttagtgaaaggtttcaatatgggtgatgtcagtgcatatgcagatctggtccaacgtggtttaccaggtttcattgaagttaaaggcgccacgtttagtggctcatctgatgggaatggtaatcctttgacaatgcagaatattccattttacgaggaatgtgtaaaatttgtgaaggcgtttaccacggaattacaaagacgtggattacattacgacttggctgccgaacatgcgcattccaactgtttattaattgcagacacgaaattcaaaattaatggagaatggcatacacatatcgattttgataaatttttcgtattgctaaactcgggcaaagacttcacgtacatggactatttagaaaagacacccgaatgggcattgtttggcaatggtgggtttgcaccagggaatacaagagtgtacagaaaagataagaaaaagcagaataaggaaaatcaagaaactacaacgagagagacgcctctccctcctattcctgcttaa

SEQ ID NO: 11030 - DNA, 2433 bp, Artificial Sequence
  Description of Artificial Sequence: Synthetic polynucleotide
atggatggttttcgtgtagctggtgcgttagtagttggtgcgttaaccgctgcatatttatattttggcggaaggttttccatagcgttggtcattatagtaggttatggtatttattgcaatgaagccagcggtggtagtcaagatagtcaagagaagctcgatttgaacaaacaacagaaaaagccatgttgcagtgataagaagattgcggatggaggaaaaaaaactggcggatgttgttctgataagaagaacggtggtggtaaaggtggaggatgctgttcctctaaaggtggaaagaaaggggggtgttgttcttctaaaggtggaaagaaaggaggatgttgttcctctaaaaagaatattggtgacaatgaaaatactgccactgaagttgagaaagccgtaaattaccctgttactgtggattttacagaagtttttaggaagcccactaagaaaaggtctagtacccccaaggttttttccaaaaatagctcttctaactctagagtaggtaaaaaattaagtgtttccaagaagataggtccagatggattgatcaagagcgcgttgactatttctaatgaaacgcttttgagttctcagatctatgtgttatatagttccttacaaggtgcagcttccaaagctgcaaagagcgtttacgacaaattgaaggaattggatgaattgactaatgagccaaaacttttgaaccttgacgatttatccgatttcgatgactattttataaatgttcccgttgaaaatgcattgtatgtgcttgttttaccgtcttatgatatcgattgccctttggattatttcttacaaactcttgaagagaatgcgaatgattttagagtagatagtttcccattaagaaaattggttggctacacagttttggggcttggtgattctgaaagttggcctgaaaagttttgttatcaagccaaaagggccgatcactggatttctcgtttaggtggcaggagaattttccccttaggcaaagtttgtatgaaaacaggaggtagtgccaaaatcgatgagtggacatctttgttagcagagactttgaaagatgatgaaccaattatttatgagtatgatgaaaacgcagactctgaggaagatgaagaagaaggtaatggtagtgatgaattaggcgatgtagaagatattggtggtaagggtagtaatggaaagttttctggcgcagatgaaatcaaacaaatggtggcgaaagacagtccaacgtacaagaacttgacaaagcaaggttacaaagttattggttcccattctggcgttaagatctgcagatggactaagaatgaattgcgtggtaaagggtcttgttataaaaaatctctcttcaatatcgcgtccagtagatgcatggaattgactccttctttggcatgttcttccaaatgcgttttctgttggaggcatggtacaaatcccgtgtctaaaaactggagatgggaagtagatgaaccagaatacattttggaaaatgctttgaagggacactattccatgatcaaacagatgagaggtgtgcccggtgttattgcagaaagatttgcgaaagcgtttgaagttcgtcattgtgccttgtctcttgtcggcgagcctattctttatcctcatatcaataaatttatccaattattacaccaaaagggcataactagtttccttgtgtgcaatgcccaacatccagaggccttgagaaatattgttaaagtaacacaattatatgtttctattgacgcacccaccaagacagagttgaaaaaagtggatagacctttgtacaaagatttctgggagagaatggtagaatgcttagagattttgaaaactgtacaaaaccatcaaaggacagttttcaggttaactttagtgaaaggtttcaatatgggtgatgtcagtgcatatgcagatttggtccaacgtggtttaccaggtttcattgaagttaaaggcgccacgtttagtggctcttctgatgggaatggtaatcctttgacaatgcagaatattccattttacgaggaatgtgtaaaatttgtgaaggcgtttaccacggaattacaaagacgtggattacattacgacttggctgccgaacatgcgcattccaactgtttattaattgcagacacgaaattcaaaattaatggagaatggcatacacatatcgattttgataaatttttcgtattgttgaacagtggcaaagacttcacgtacatggactatttagaaaagacacccgaatgggcattgtttggcaatggtgggtttgcaccagggaatacaagagtgtacagaaaagataagaaaaagcagaataaggaaaatcaagaaactacaacgagagagacgcctctccctcctattcctgcttga

SEQ ID NO: 11031 - DNA, 966 bp, Saccharomyces cerevisiae
atggttgaaattgtgggccacagagcttttaaagcaagatatcctgaaaatacgctactagcatttgagaaggcttatgcagcaggtgctgatgtaatagaaacggatttacaaatgaccagcgatggtatggtggtggtaaaccatgactcagacactggtcggatgtgggataagaacttggtgattggcgagtcgacttgggaggaggttaagcgattgcgctgcaaagaggatggttccttagcaatgatgacattgaaggaaattctaacatgggcagtgtgccatccaggagctaaattgatgttggacatcaaatttaccaacgagaaaatcatcatgatcaagacctttgttatcatgttagaggttaagaatgatcttaaattttggcaggagaggatcacgtgggggctttggttgctggattggtacgatttcggtattgaaactggtgttctgaaggatttcaaagttattgtgataagtctgtctttagatatcgcctcgcaatttgtgaagcgctctttgacactgaatgatcctcactataaactttttggtatcagcgtccattttgtctcctcgtggacaagccaatttagattgagattactacctgtgcttatgaagaatgatatcaaggtctatttatggactgtcaacaaacctatagatttcaaatatctgtgcgaattgcctatccatggtgctatcacggatgatccgatcaaggcaagaaagttatgcgatggtcataccgtggcgaagaagcctactgctgaaaaaaagtttgttgcgcccagtctggcatctgtagatgggctaagattccatgcttttatcaaagtttataacatcctttgcacgcttctatattccaaatgggtccatattaagttgtgcggttggtctattgcttatgtgatttttttgttccttcgaaccattcattttctttga

SEQ ID NO: 11032 - DNA, 966 bp, Artificial Sequence
  Description of Artificial Sequence: Synthetic polynucleotide
atggttgaaattgtgggccacagagcttttaaagcaagatatcctgaaaatacgttattggcatttgagaaggcttatgcagcaggtgctgatgtaatagaaacggatttacaaatgaccagcgatggtatggtggtggtaaaccatgacagtgacactggtagaatgtgggataagaacttggtgattggcgagtctacttgggaggaggttaagagattgcgctgcaaagaggatggttccttagcaatgatgacattgaaggaaattttaacatgggcagtgtgccatccaggagctaaattgatgttggacatcaaatttaccaacgagaaaatcatcatgatcaagacctttgttatcatgttagaggttaagaatgatcttaaattttggcaggagaggatcacgtgggggctttggttgttggattggtacgatttcggtattgaaactggtgttttgaaggatttcaaagttattgtgataagtttatctttagatatcgcctctcaatttgtgaagcgctctttgacattaaatgatcctcactataaactttttggtatcagcgtccattttgtctcctcttggacaagccaatttagattgagattattgcctgtgcttatgaagaatgatatcaaggtctatttatggactgtcaacaaacctatagatttcaaatatttgtgcgaattgcctatccatggtgctatcacggatgatccgatcaaggcaagaaagttatgcgatggtcataccgtggcgaagaagcctactgctgaaaaaaagtttgttgcgcccagtttagcatctgtagatgggttgagattccatgcttttatcaaagtttataacatcctttgcacgcttttatattccaaatgggtccatattaagttgtgcggttggtctattgcttatgtgatttttttgttccttagaaccattcattttctttga

SEQ ID NO: 11033 - DNA, 1485 bp, Saccharomyces cerevisiae
atggacttaagagtaggaaggaaatttcgtattggcaggaagattgggagtggttcctttggtgacatttaccacggcacgaacttaattagtggtgaagaagtagccatcaagctggaatcgatcaggtccagacatcctcaattggactatgagtcccgcgtctacagatacttaagcggtggtgtgggaatcccgttcatcagatggtttggcagagagggtgaatataatgctatggtcatcgatcttctaggcccatctttggaagatttattcaactactgtcacagaaggttctcctttaagacggttatcatgctggctttgcaaatgttttgccgtattcagtatatacatggaaggtcgttcattcatagagatatcaaaccagacaactttttaatgggggtaggacgccgtggtagcaccgttcatgttattgatttcggtctatcaaagaaataccgagatttcaacacacatcgtcatattccttacagggagaacaagtccttgacaggtacagctcgttatgcaagtgtcaatacgcatcttggaatagagcaaagtagaagagatgacttagaatcactaggttatgtcttgatctatttttgtaagggttctttgccatggcagggtttgaaagcaaccaccaagaaacaaaagtatgatcgtatcatggaaaagaaattaaacgttagcgtggaaactctatgttcaggtttaccattagagtttcaagaatatatggcttactgtaagaatttgaaattcgatgagaagccagattatttgttcttggcaaggctgtttaaagatctgagtattaaactagagtatcacaacgaccacttgttcgattggacaatgttgcgttacacaaaggcgatggtggagaagcaaagggacctcctcatcgaaaaaggtgatttgaacgcaaatagcaatgcagcaagtgcaagtaacagcacagacaacaagtctgaaactttcaacaagattaaactgttagccatgaagaaattccccacccatttccactattacaagaatgaagacaaacataatccttcaccagaagagatcaaacaacaaactatcttgaataataatgcagcctcttctttaccagaggaattattgaacgcactagataaaggtatggaaaacttgagacaacagcagccgcagcagcaggtccaaagttcgcagccacaaccacagccccaacagctacagcagcaaccaaatggccaaagaccaaattattatcctgaaccgttactacagcagcaacaaagagattctcaggagcaacagcagcaagttccgatggctacaaccagggctactcagtatcccccacaaataaacagcaataattttaatactaatcaagcatctgtacctccacaaatgagatctaatccacaacagccgcctcaagataaaccagctggccagtcaatttggttgtaa

SEQ ID NO: 11034 - DNA, 1485 bp, Artificial Sequence
  Description of Artificial Sequence: Synthetic polynucleotide
atggacttaagagtaggaaggaaatttcgtattggcaggaagattgggagtggttcctttggtgacatttaccacggcacgaacttaattagtggtgaagaagtagccatcaagttggaaagtatcaggtccagacatcctcaattggactatgagtcccgcgtctacagatacttaagcggtggtgtgggaatcccgttcatcagatggtttggcagagagggtgaatataatgctatggtcatcgatcttttgggcccatctttggaagatttattcaactactgtcacagaaggttctcctttaagacggttatcatgttggctttgcaaatgttttgccgtattcagtatatacatggaaggtctttcattcatagagatatcaaaccagacaactttttaatgggggtaggacgccgtggtagcaccgttcatgttattgatttcggtttatccaagaaatacagagatttcaacacacatcgtcatattccttacagggagaacaagtccttgacaggtacagctcgttatgcaagtgtcaatacgcatcttggaatagagcaaagtagaagagatgacttagaatctttgggttatgtcttgatctatttttgtaagggttctttgccatggcagggtttgaaagcaaccaccaagaaacaaaagtatgatcgtatcatggaaaagaaattaaacgttagcgtggaaactttgtgttctggtttaccattagagtttcaagaatatatggcttactgtaagaatttgaaattcgatgagaagccagattatttgttcttggcaaggttatttaaagatttgagtattaaattagagtatcacaacgaccacttgttcgattggacaatgttgcgttacacaaaggcgatggtggagaagcaaagggacctcctcatcgaaaaaggtgatttgaacgcaaatagcaatgcagcaagtgcaagtaacagcacagacaacaagtctgaaactttcaacaagattaaattattagccatgaagaaattccccacccatttccactattacaagaatgaagacaaacataatccttctccagaagagatcaaacaacaaactatcttgaataataatgcagcctcttctttaccagaggaattattgaacgcattggataaaggtatggaaaacttgagacaacagcagccgcagcagcaggtccaaagttctcagccacaaccacagccccaacagttacagcagcaaccaaatggccaaagaccaaattattatcctgaaccgttattgcagcagcaacaaagagattctcaggagcaacagcagcaagttccgatggctacaaccagggctactcagtatcccccacaaataaacagcaataattttaatactaatcaagcatctgtacctccacaaatgagatctaatccacaacagccgcctcaagataaaccagctggccagagtatttggttgtga

SEQ ID NO: 11035 - DNA, 1143 bp, Saccharomyces cerevisiae
atggaattcgttgcagaaagggctcagccagttggtcaaacaatccagcagcaaaatgttaatacttacgggcaaggcgtcctacaaccgcatcatgatttacagcagcgacaacaacaacaacagcagcgtcagcatcaacaactgctgacgtctcagttgccccagaaatctctcgtatccaaaggcaaatatacactacatgacttccagattatgagaacgcttggtactggatcttttggtagggttcatttggtgcgctctgttcacaatggtcggtattatgctataaaagttttaaagaaacaacaagttgtcaagatgaaacaggttgaacataccaatgacgaacgacgtatgctaaagcttgtggagcatccgtttctgattagaatgtggggtacgtttcaagatgctaggaatatctttatggtgatggattatatcgaaggtggtgaacttttctcgttactgagaaagtcacaaagatttcctaatcctgtagcaaaattttacgctgcggaagtcatactggcattagagtacttgcatgctcataatatcatctacagggatttaaagccagaaaatatcttgctggatagaaatggccacattaaaataaccgattttgggttcgccaaagaggtacaaactgtcacatggacgctttgtgggactcctgattacattgctcctgaagttattaccacaaagccatataataagtcggtggattggtggtctctaggtgttctaatctacgaaatgttagctggttatacacccttttacgatactactccaatgaagacgtatgaaaagattttacaaggtaaagtagtatatccaccatattttcatcccgacgtcgtggatctactaagcaaactgatcactgcagatttgacaagaagaatcggtaatttacaaagcggttccagggacatcaaagctcacccatggtttagtgaagttgtatgggaaagattgttagcaaaggatattgaaactccatacgagcctcctatcacatcaggtatcggtgacacgtctttattcgatcaatatcccgaggagcagctagattatggtattcaaggcgatgatccatatgctgaatactttcaagatttctaa

SEQ ID NO: 11036 - DNA, 1143 bp, Artificial Sequence
  Description of Artificial Sequence: Synthetic polynucleotide
atggaattcgttgcagaaagggctcagccagttggtcaaacaatccagcagcaaaatgttaatacttacgggcaaggcgtcttacaaccgcatcatgatttacagcagagacaacaacaacaacagcagcgtcagcatcaacaattattgacgtctcagttgccccagaaatctctcgtatccaaaggcaaatatacattgcatgacttccagattatgagaacgcttggtactggatcttttggtagggttcatttggtgcgctctgttcacaatggtagatattatgctataaaagttttaaagaaacaacaagttgtcaagatgaaacaggttgaacataccaatgacgaaagacgtatgttgaagcttgtggagcatccgtttttgattagaatgtggggtacgtttcaagatgctaggaatatctttatggtgatggattatatcgaaggtggtgaacttttctctttattaagaaagtctcaaagatttcctaatcctgtagcaaaattttacgctgcggaagtcatattggcattagagtacttgcatgctcataatatcatctacagggatttaaagccagaaaatatcttgttggatagaaatggccacattaaaataaccgattttgggttcgccaaagaggtacaaactgtcacatggacgctttgtgggactcctgattacattgctcctgaagttattaccacaaagccatataataagtctgtggattggtggtctttgggtgttttgatctacgaaatgttagctggttatacacccttttacgatactactccaatgaagacgtatgaaaagattttacaaggtaaagtagtatatccaccatattttcatcccgacgtcgtggatttattaagcaaattaatcactgcagatttgacaagaagaatcggtaatttacaaagcggttccagggacatcaaagctcacccatggtttagtgaagttgtatgggaaagattgttagcaaaggatattgaaactccatacgagcctcctatcacatctggtatcggtgacacgtctttattcgatcaatatcccgaggagcagttagattatggtattcaaggcgatgatccatatgctgaatactttcaagatttctga

SEQ ID NO: 11037 - DNA, 1251 bp, Saccharomyces cerevisiae
atgaaagcaaagtcgatgaagagcataatatctgtgccaatatcagtgtctaaaacagggaaaatgaagttaacagcatctcccgataatctagcatctatgatgtctaaagaccaaaataaacttattcatttagacccagttccgtcttttgaggacaggcacgagattaaaccgtggctacagaaaatattctatcctcaaggaatagatatagtcatcgaaagatcagatagtagcaaagttacttttaagtgtaggtcagtacgatcgaaagtagggttgaaccctaaatccaaaggttcctcttcaagatcccatgcatgtccatttagaattagagcagcctactctgtgcggttacagaagtggaacgtggttgttatgaataacatacattcacatgagctgagatttgatttgattactaaaacggatgactataaaaagtttaaggaaaatcttcgtcagaagaacgacgaaaaagccatcaaaacatttgatgaattagaatataaagcaagtctaaacttaccactcgtcacaccaattatttcttgtgactgtgggttaaccaaggaaattgaagctttcaataacatttttctcccactatcaaacccccctttgacgtctaaaaaaaatttgctcaaaacaaataaaaactccgtttctaaaataaaatccagacagatggataattcgaaacctaggccaaggttgaaaacgaagttggatgcggatctacatgataccggatttttagacaatttcaaaacgcggaattcctgtgtaaagatagagaaagaagattctttaacgaacttaaacgaaattgattttacgaacatgttttgcaacgacaatttcatccaaaattacaaccaaggcctgatggaacttttgacagaacctacaccaggtccttcgtcctcttcttgtatacttccttcaacaccaacgaggcccttgtcacaaagcaaaatggatatagccctgtcagaatcaacaacatcttcaccaaattttatggaaacagacgctccttatggagatgagatcattaaagtttccaaagataccaaaagcaacgcaccaactgctgatacagatattgctacgaacttaggcaaagagagaaacgaaaattttggcatgttaaactacaactacgaagcgttgcttcatttcaacgatgagcattttaatgaattaaattctattgacccagccttaatatcaaaatattaa

SEQ ID NO: 11038 - DNA, 1251 bp, Artificial Sequence
  Description of Artificial Sequence: Synthetic polynucleotide
atgaaagcaaagtctatgaagagcataatatctgtgccaatatctgtgtctaaaacagggaaaatgaagttaacagcatctcccgataatttggcatctatgatgtctaaagaccaaaataaacttattcatttagacccagttccgtcttttgaggacaggcacgagattaaaccgtggttacagaaaatattctatcctcaaggaatagatatagtcatcgaaagaagtgatagtagcaaagttacttttaagtgtaggtctgtaagaagtaaagtagggttgaaccctaaatccaaaggttcctcttctagatcccatgcatgtccatttagaattagagcagcctactctgtgagattacagaagtggaacgtggttgttatgaataacatacattctcatgagttaagatttgatttgattactaaaacggatgactataaaaagtttaaggaaaatcttcgtcagaagaacgacgaaaaagccatcaaaacatttgatgaattagaatataaagcaagtttgaacttaccactcgtcacaccaattatttcttgtgactgtgggttaaccaaggaaattgaagctttcaataacatttttctcccattatctaacccccctttgacgtctaaaaaaaatttgctcaaaacaaataaaaactccgtttctaaaataaaatccagacagatggataattctaaacctaggccaaggttgaaaacgaagttggatgcggatttgcatgataccggatttttagacaatttcaaaacgagaaattcctgtgtaaagatagagaaagaagattctttaacgaacttaaacgaaattgattttacgaacatgttttgcaacgacaatttcatccaaaattacaaccaaggcttaatggaacttttgacagaacctacaccaggtccttcttcctcttcttgtatacttccttctacaccaacgaggcccttgtctcaaagcaaaatggatatagccttgagtgaatctacaacatcttctccaaattttatggaaacagacgctccttatggagatgagatcattaaagtttccaaagataccaaaagcaacgcaccaactgctgatacagatattgctacgaacttaggcaaagagagaaacgaaaattttggcatgttaaactacaactacgaagcgttgcttcatttcaacgatgagcattttaatgaattaaattctattgacccagccttaatatccaaatattga

SEQ ID NO: 11039 - DNA, 1386 bp, Saccharomyces cerevisiae
atgggtatacctatgcaaatataccaggatgggaagggggtgcaattttaccacacgagatatcagaacgtatttgacgaacgggcgagcaagtatggcaactacacggtgaataatgattacccacagcttccagatacgataaaggaacatatcgaccagcttacctttagcaatgtcggagaggatggtggagatgttggaaactattctgaagaagacgatgatggtgacgaagaaaaggaacttgaagatgtttttcgaagtaaccgtgggttggaatttgtacggattaataactattttactacccacgatttacaaagtttcaaaagttttagaaatttcaatagcaagtactggattttttattctaatcaagcagaggacaaaaaattactgctgtatgactttaacggccaacatttgatttttattaagcagcaattttacgggcagttgaatttactgctatcggacgcaataatatgtatggactgcaattttggttataattcaaacaccattcaaattttagttggatttcagaatggaaagttgttaaagctaaactgcgacttgaacggaaacgtaaacaatcacttgcttttgaaggatccttcaacttcctctcatcaaagccacctatctatattaaatgtctgggcaggtttgttgccacatttcgttgtttcttttagtttgaaagatgggctgctaataacttctttagatcaccaacaaagcaatggaagttttcaaagtttccataccaacattgatttgcctgtagatctacgcacgaccacaaatgtcaagtccgttttaaatttccctcagtttactttatacaaaggaaatgatatgattttccactgcaagaatctattaggatcggatgcttccacgctaaacaaggaaataaactttatgcttaaaatagacgaagacgttcaaaagatcgactatcttcttaaaacgaatcacattttactcgaaaccaacatgagatatctgtccattccaacaagagaccccatagagaattcaaattcttctccacccgtctcagacagcgaggtttatccaatattttacaagacacaagaacttcatgtccatgcttcaggaacaggacgtcagatagcaaacaatgggaagtatatttttataaccgagcaacatctctacggaacagcgttatcggtatacaagtactctatatctttcaaacggtggctgttcgtgggctactcagacattagggccaaatacggtataaggagtgtcaaagatctctttgttggtaactgtccctctgtaaatagcccagtgctgacaattcttactgatgacaataacattcaaacaattcttcttaaataa

SEQ ID NO: 11040 - DNA, 1386 bp, Artificial Sequence
  Description of Artificial Sequence: Synthetic polynucleotide
atgggtatacctatgcaaatataccaggatgggaagggggtgcaattttaccacacgagatatcagaacgtatttgacgaaagagcgagcaagtatggcaactacacggtgaataatgattacccacagcttccagatacgataaaggaacatatcgaccagcttacctttagcaatgtcggagaggatggtggagatgttggaaactattctgaagaagacgatgatggtgacgaagaaaaggaacttgaagatgtttttagaagtaaccgtgggttggaatttgtaagaattaataactattttactacccacgatttacaaagtttcaaaagttttagaaatttcaatagcaagtactggattttttattctaatcaagcagaggacaaaaaattattattatatgactttaacggccaacatttgatttttattaagcagcaattttacgggcagttgaatttattattaagtgacgcaataatatgtatggactgcaattttggttataatagcaacaccattcaaattttagttggatttcagaatggaaagttgttaaagttgaactgcgacttgaacggaaacgtaaacaatcacttgcttttgaaggatccttccacttcctctcatcaaagccacttatctatattaaatgtctgggcaggtttgttgccacatttcgttgtttcttttagtttgaaagatgggttgttaataacttctttagatcaccaacaaagcaatggaagttttcaaagtttccataccaacattgatttgcctgtagatttacgcacgaccacaaatgtcaagtccgttttaaatttccctcagtttactttatacaaaggaaatgatatgattttccactgcaagaatttattaggaagtgatgcttccacgttgaacaaggaaataaactttatgcttaaaatagacgaagacgttcaaaagatcgactatcttcttaaaacgaatcacattttactcgaaaccaacatgagatatttatccattccaacaagagaccccatagagaatagtaattcttctccacccgtctctgacagcgaggtttatccaatattttacaagacacaagaacttcatgtccatgcttctggaacaggacgtcagatagcaaacaatgggaagtatatttttataaccgagcaacatctctacggaacagcgttaagtgtatacaagtactctatatctttcaaaagatggcttttcgtgggctacagtgacattagggccaaatacggtataaggagtgtcaaagatctctttgttggtaactgtccctctgtaaatagcccagtgttaacaattcttactgatgacaataacattcaaacaattcttcttaaatga

SEQ ID NO: 11041 - DNA, 471 bp, Saccharomyces cerevisiae
atgatggatggttccataacaaggaaggtaacatcaacgttgtccaaccaattggcgacctggaaatggaaactgcagttatcgttattggaaagaaaattagcgacaataaacaatgattattttctcctgcaatgggaactcctttttataactaatgaagtgatgaaatggaaagaaatgattgcctttttggaaagccagttattttgcacaacgcaaaatttcgtggcacaagagacacatgacagggaaacctttcaaagcctggtagatgattataacaaacagttgagcgaaaataacctgattatttctgtattgaaaagtagaccacagctatcatcatttcctatatatttgagcgatgaggtgtgttcacaccttaaattcgtcatcgcggaactaaattcattgataatagttttttttatttctttagtatttttgtgggtatcgatagaagtttaa

SEQ ID NO: 11042 - DNA, 471 bp, Artificial Sequence
  Description of Artificial Sequence: Synthetic polynucleotide
atgatggatggttccataacaaggaaggtaacaagtacgttgtccaaccaattggcgacctggaaatggaaattacagttatctttattggaaagaaaattagcgacaataaacaatgattattttctcttacaatgggaactcctttttataactaatgaagtgatgaaatggaaagaaatgattgcctttttggaaagccagttattttgcacaacgcaaaatttcgtggcacaagagacacatgacagggaaacctttcaaagcttagtagatgattataacaaacagttgagcgaaaataacttgattatttctgtattgaaaagtagaccacagttatcttcttttcctatatatttgagcgatgaggtgtgttctcaccttaaattcgtcatcgcggaattgaattctttgataatagttttttttatttctttagtatttttgtgggtatctatagaagtttga

SEQ ID NO: 11043 - DNA, 723 bp, Saccharomyces cerevisiae
atgaaaggaacaggtggagtagtagtcggaactcagaatcctgtaagggactacaatcatagcactgatgaagagtatcaaagattgagaagattagcagatgaagcgtataagaaaagagaccaactcagccatgaatcgcaaaccgcttatcaacaaggtgacaagaagctagctcatgaactaagcgagaaaagtaaggcacaactgaaaaccgctgaagattttaacatgcaagcggcagaatatgtgtttgtagagaacaatgctgattcttccagtaatgaaattgacttacatggattatacgtaaaagaggccctatttattctccaaaaaagaatcaaattcgctattgatcataatgaaccacaactgaacgttattgttggaaaagggttgcattctcaaaacggtatagcgaaactcaaaccgtcaattgaggagttctgtgctaagcatggtatcagaaaccatttggaaaaaggaaattcaggagtcttggtgcttgagttgcaaggtgtgcaaatgcagatggatggccccgcagtgaatgcccccactaatcagtacaatgcacaaccacatcctcaatataacaacaatggaggacagcctcaaggtcaagctcagaattataataacagtggcaatgacaacaaagatagtactttgactagtatattcaaaatcttttgtaattgtatacaaagtttggcgtga

SEQ ID NO: 11044 - DNA, 723 bp, Artificial Sequence
  Description of Artificial Sequence: Synthetic polynucleotide
atgaaaggaacaggtggagtagtagtcggaactcagaatcctgtaagggactacaatcatagcactgatgaagagtatcaaagattgagaagattagcagatgaagcgtataagaaaagagaccaactcagccatgaatctcaaaccgcttatcaacaaggtgacaagaagttggctcatgaattgagcgagaaaagtaaggcacaattgaaaaccgctgaagattttaacatgcaagcggcagaatatgtgtttgtagagaacaatgctgattcttccagtaatgaaattgacttacatggattatacgtaaaagaggccttatttattctccaaaaaagaatcaaattcgctattgatcataatgaaccacaattgaacgttattgttggaaaagggttgcattctcaaaacggtatagcgaaactcaaaccgtctattgaggagttctgtgctaagcatggtatcagaaaccatttggaaaaaggaaattctggagtcttggtgcttgagttgcaaggtgtgcaaatgcagatggatggccccgcagtgaatgcccccactaatcagtacaatgcacaaccacatcctcaatataacaacaatggaggacagcctcaaggtcaagctcagaattataataacagtggcaatgacaacaaagatagtactttgactagtatattcaaaatcttttgtaattgtatacaaagtttggcgtga

SEQ ID NO: 11045 - DNA, 735 bp, Saccharomyces cerevisiae
atgtccactgaaaaaatcttgactcctgaatctcaattgaagaagactaaagctcaacaaaagactgcagaacaaattgctgcagagagagctgcccgtaaagccgctaacaaggaaaaaagagctattattttggaaagaaacgccgcttaccaaaaggaatacgaaactgctgaaagaaacatcattcaagctaagcgtgatgccaaggctgctggttcctactacgtcgaagctcaacacaagttggtcttcgttgtcagaatcaagggtattaacaagattccacctaagccaagaaaggttctacaattgctaagattgacaagaatcaactctggtacattcgtcaaagttaccaaggctactttggaactattgaagttgattgaaccatacgttgcttacggttacccatcctactctactattagacaattggtctacaagagaggtttcggtaagatcaacaagcaaagagttccattgtccgacaatgctatcatcgaagccaacttgggtaagtatggtatcttgtccattgacgatttgattcacgaaatcatcactgttggtccacacttcaagcaagctaacaactttttgtggccattcaagttgtccaacccatctggtggttggggtgtcccaagaaagttcaagcatttcatccaaggtggttctttcggtaaccgtgaagaattcatcaataaattggttaaggctatgaactaa

SEQ ID NO: 11046 - DNA, 735 bp, Artificial Sequence
  Description of Artificial Sequence: Synthetic polynucleotide
atgtccactgaaaaaatcttgactcctgaatctcaattgaagaagactaaagctcaacaaaagactgcagaacaaattgctgcagagagagctgcccgtaaagccgctaacaaggaaaaaagagctattattttggaaagaaacgccgcttaccaaaaggaatacgaaactgctgaaagaaacatcattcaagctaagcgtgatgccaaggctgctggttcctactacgtcgaagctcaacacaagttggtcttcgttgtcagaatcaagggtattaacaagattccacctaagccaagaaaggttttgcaattgttaagattgacaagaatcaactctggtacattcgtcaaagttaccaaggctactttggaattattgaagttgattgaaccatacgttgcttacggttacccatcctactctactattagacaattggtctacaagagaggtttcggtaagatcaacaagcaaagagttccattgtccgacaatgctatcatcgaagccaacttgggtaagtatggtatcttgtccattgacgatttgattcacgaaatcatcactgttggtccacacttcaagcaagctaacaactttttgtggccattcaagttgtccaacccatctggtggttggggtgtcccaagaaagttcaagcatttcatccaaggtggttctttcggtaaccgtgaagaattcatcaataaattggttaaggctatgaactga

SEQ ID NO: 11047 - DNA, 822 bp, Saccharomyces cerevisiae
atgtttggagtcaaggatgctatattcaagattaaacgttccattgcaggcacagattcttctgattccactgcttacacaacggcaagtgaatcttcacctcaattaaaagattcccataacccctttcgaaataaaacgacatccgagagaactatagttgaggagggctctctaccaccggtgagattgaatggctacttgccctcaactaaaaataaacttcttactcctgaaatgtgcgatgaaataagaacattaatgcccacgaggatacagttgtacaccgaatggaaccttctatatagccttgagcaacatgggtcttcattacactccctgtatagtaacgttgctccagatagcaaggaatttagaagagtggggtatgtattagtaataaaggatcgtaaaaacggaatctttggagcttacagcaacgaagcttttcatcctaacgaacataggcaatacacaggaaacggggaatgttttctatggaagctggataaagtacctgatgttaatatatccgaaaaagaagaatctgagcaagaaggtaaagaaggtaaggaggaaggggataaagaggagagatggaggttttcaggttatccttacactggagttaacgaatttgctatatactgtacatctgaatttctttcaatgggtgcaggtgatggtcattatggtcttttatgcgatgacggcctactccatggtgtttcaaacccttgtcaaacatatggcaatgaagttttgagtaaggagggcaaaaaattttctatagtagctttggaagtatggcgtgtaggatag

SEQ ID NO: 11048 - DNA, 822 bp, Artificial Sequence
  Description of Artificial Sequence: Synthetic polynucleotide
atgtttggagtcaaggatgctatattcaagattaaacgttccattgcaggcacagattcttctgattccactgcttacacaacggcaagtgaatcttctcctcaattaaaagattcccataacccctttagaaataaaacgacatccgagagaactatagttgaggagggctctttaccaccggtgagattgaatggctacttgccctccactaaaaataaacttcttactcctgaaatgtgcgatgaaataagaacattaatgcccacgaggatacagttgtacaccgaatggaaccttttatatagccttgagcaacatgggtcttctttacactccttatatagtaacgttgctccagatagcaaggaatttagaagagtggggtatgtattagtaataaaggatcgtaaaaacggaatctttggagcttacagcaacgaagcttttcatcctaacgaacataggcaatacacaggaaacggggaatgttttttatggaagttggataaagtacctgatgttaatatatccgaaaaagaagaatctgagcaagaaggtaaagaaggtaaggaggaaggggataaagaggagagatggaggttttctggttatccttacactggagttaacgaatttgctatatactgtacatctgaatttctttctatgggtgcaggtgatggtcattatggtcttttatgcgatgacggcttgctccatggtgtttctaacccttgtcaaacatatggcaatgaagttttgagtaaggagggcaaaaaattttctatagtagctttggaagtatggcgtgtaggatga

SEQ ID NO: 11049 - DNA, 2799 bp, Saccharomyces cerevisiae
atgacctctttatatgcacctggggcggaggatattcggcaaaggttacgtccttttgggtttttctttgagaaatcactaaaggatttgattaagggtattaggtctcacaacgaaacaccagaaaaactggatcaattctttaaacaagtattaagtgaatgccgggaagaagtgaactctccagatctaaattctaagaccaatgccgttcttaaattgacctatttagagatgtacggttttgacatggcttggtgcaactttcatatcttagaggttatgagcagtaataaacttcaacaaaaacgtgtggggtatttggctgcatcacaatctttttacaaagattctgacattttgatgcttgcaactaacttgttgaaaaaagacttaaagtatgacggaaacaatgatgttgttaaagttggcattgctttaagtggtctttccactataattacaccctcattagcaagagatatagctgatgatttgttcactatgctaaacagcacaagaccgtacataagaaagaaggccattaccgcactatttaaagtttttctgcaatatccagaggctttgagagataattttgataagtttgtttcaaagctagacgatgatgatatatctgtggtttctgccgctgtcagtgttatttgcgagctatcaaaaaaaaacccccaaccattcatccagctttcacctttattatacgagatattagttaccattgacaataactggataatcattagattattgaagttattcaccaacttatcacaagtggaaccgaaattgagagccaagttattgccgaaaattttagaactgatggagagtactgttgcaacttctgtgatctatgaatctgtcaactgtattgtcaaggggaatatgctagaagaagatgattttgaaacagcaatggcatgcctggaaagattgcacacattttgtgattctcaggatccaaatttgagatatattagctgcatattgttttacaagatcggcaaaatcaatactgattttatttctcggttcgaccaactgattatacgcttactctccgatgtcgacgtttctataagatcaaaagcaattgaattggttgaaggtattgttgatgaggataacttaaaggcaattgtccaaacattgatgaagcaatttgtagatgaagatgtggttatcctacaaactggaagcatcgtatacgaaaaatcaaagagaattcccataataattccagaaaattacaagataaaaatggtgaacgtcattatatcgatttgttcagctgacaactattccagtgttaacgactttgaatggtacaatgcagtaataatggacttggcgatgctctgtcaagacatatctgataaaagccttggatcaaaaattggtgaacagtttaggaatttgatgataaaagttccttcaatgagagaagtaaccattgctaatattataaagcttatttcaaatgacaatattaacaaacagttgcctaccgtattgagagaatgcatttggtgtctcggagaattttctaccctagttgaaaatggtaacgacttaataaaaatcatgactgagaatatcagttattattctcatagtgtacaagaagttttaattttagcacttgttaaagtatttagtaattggtgtaataactttcaggaggataaacgctttgaaattaaaatggtgttaaaagagctaattgaattttttgaaaatttatcttattcgagtacattcgaagtccaggaaagaagcgtagaagttttagaatttttaagactaagtttggaggctttagaggaggatacggaaggtctaccaatgctactgagcgaagtcctgcctagtttttttaacgcctatgaactcgcaccaattgcgcgtgggactcaattgaagttagcagtagatgagaatcttgatctagaaactccatttttgacaaaggaggcagctgatgaactcttagatgaacaaaaaagtgacgccatcagtgatttaatgtctgatatctcaatggacgagcaagttgaactaaaattcgttgatgattctgatacttcgtatgaagaaaaggaaaaattggatgattttgaaaatccatttgagattgagagagaaaaggaacggatgtcaaatccttattatctaggtgaagaagacgaagaaagaactaagaactctaaagatttgttggacttgaatgaggaggaaagtagtgataaaaagccagaaactattagattaaatagaaccgataattcgttgaattctctaagtttatctacaactgaaatcagcagaaagaagaagaagggaaagaagaaaaatagggttcaagtcttatccgatgaacctgttatcgaagccgctcccaaaaggaaagatgcattccagaaaccccatgataatcattcaactcaaaatcctttgaaaaaggacaagattaatctgagaatgcactctcaacttgaaaattttgatttttccaattttgggcaatcgagtaacgcaggaagaggatcgcaggaagagggcaaccttagaaaggaagacgagttagaattaagtcgtttagaggccaatcttattgtaaaagatgaaaaggataatttaagtgatactgaagaagttatagttataaaaaagaagaagaaagggaaaaagtcaaagtcaaaaaacaaactaaaaacgaaagcaaaaaattctccagaaccaaatgaatttcttcgagaccaaagcactgacatttaa

SEQ ID NO: 11050 - DNA, 2799 bp, Artificial Sequence
  Description of Artificial Sequence: Synthetic polynucleotide
atgacctctttatatgcacctggggcggaggatattagacaaaggttacgtccttttgggtttttctttgagaaatctttgaaggatttgattaagggtattaggtctcacaacgaaacaccagaaaaattggatcaattctttaaacaagtattaagtgaatgcagagaagaagtgaactctccagatttgaattctaagaccaatgccgttcttaaattgacctatttagagatgtacggttttgacatggcttggtgcaactttcatatcttagaggttatgagcagtaataaacttcaacaaaaacgtgtggggtatttggctgcatctcaatctttttacaaagattctgacattttgatgcttgcaactaacttgttgaaaaaagacttaaagtatgacggaaacaatgatgttgttaaagttggcattgctttaagtggtctttccactataattacaccctctttagcaagagatatagctgatgatttgttcactatgttgaacagcacaagaccgtacataagaaagaaggccattaccgcattatttaaagtttttttgcaatatccagaggctttgagagataattttgataagtttgtttccaagttggacgatgatgatatatctgtggtttctgccgctgtcagtgttatttgcgagttatccaaaaaaaacccccaaccattcatccagctttctcctttattatacgagatattagttaccattgacaataactggataatcattagattattgaagttattcaccaacttatctcaagtggaaccgaaattgagagccaagttattgccgaaaattttagaattgatggagagtactgttgcaacttctgtgatctatgaatctgtcaactgtattgtcaaggggaatatgttggaagaagatgattttgaaacagcaatggcatgcttagaaagattgcacacattttgtgattctcaggatccaaatttgagatatattagctgcatattgttttacaagatcggcaaaatcaatactgattttatttctagattcgaccaattgattatacgcttactctccgatgtcgacgtttctataagaagtaaagcaattgaattggttgaaggtattgttgatgaggataacttaaaggcaattgtccaaacattgatgaagcaatttgtagatgaagatgtggttatcttgcaaactggaagcatcgtatacgaaaaatccaagagaattcccataataattccagaaaattacaagataaaaatggtgaacgtcattatatctatttgttctgctgacaactattccagtgttaacgactttgaatggtacaatgcagtaataatggacttggcgatgctctgtcaagacatatctgataaaagccttggatctaaaattggtgaacagtttaggaatttgatgataaaagttccttctatgagagaagtaaccattgctaatattataaagcttatttctaatgacaatattaacaaacagttgcctaccgtattgagagaatgcatttggtgtctcggagaattttctaccttggttgaaaatggtaacgacttaataaaaatcatgactgagaatatcagttattattctcatagtgtacaagaagttttaattttagcacttgttaaagtatttagtaattggtgtaataactttcaggaggataaacgctttgaaattaaaatggtgttaaaagagttgattgaattttttgaaaatttatcttattctagtacattcgaagtccaggaaagaagcgtagaagttttagaatttttaagattaagtttggaggctttagaggaggatacggaaggtttgccaatgttattaagcgaagtcttacctagtttttttaacgcctatgaactcgcaccaattgcgcgtgggactcaattgaagttagcagtagatgagaatcttgatttggaaactccatttttgacaaaggaggcagctgatgaactcttagatgaacaaaaaagtgacgccatcagtgatttaatgtctgatatctctatggacgagcaagttgaattgaaattcgttgatgattctgatacttcttatgaagaaaaggaaaaattggatgattttgaaaatccatttgagattgagagagaaaaggaaagaatgagtaatccttattatttgggtgaagaagacgaagaaagaactaagaactctaaagatttgttggacttgaatgaggaggaaagtagtgataaaaagccagaaactattagattaaatagaaccgataattctttgaattctttgagtttatctacaactgaaatcagcagaaagaagaagaagggaaagaagaaaaatagggttcaagtcttatccgatgaacctgttatcgaagccgctcccaaaaggaaagatgcattccagaaaccccatgataatcattctactcaaaatcctttgaaaaaggacaagattaatttaagaatgcactctcaacttgaaaattttgatttttccaattttgggcaaagtagtaacgcaggaagaggatctcaggaagagggcaaccttagaaaggaagacgagttagaattaagtcgtttagaggccaatcttattgtaaaagatgaaaaggataatttaagtgatactgaagaagttatagttataaaaaagaagaagaaagggaaaaagtccaagagtaaaaacaaattgaaaacgaaagcaaaaaattctccagaaccaaatgaatttcttcgtgaccaaagcactgacatttga

SEQ ID NO: 11051 - DNA, 1839 bp, Saccharomyces cerevisiae
atgtcatttaaggcaactatcaccgagtcggggaagcagaatatctggtttcgtgcgatatatgtgttatctacaattcaggatgatatcaagattacagtgacaacaaatgagttaattgcttggtcaatgaacgagacagatactactctttgtcaggttaggtttcagaaaagcttttttgaggagtatgagtttaaaccacatgagattgtatttggagaaaatggggttcaagttatagaagatacgtacggcaatagtcataagttatactccttccgtgttaatggaagacacctaacaactatatcaagaaagccggatggtgatggcatcaaatcattcacaattgcggtaaacaacacttctacctgtcctgaatcacttgcaaatagattgattgtggtgattgaaatggattcgttaatagtcaaagaatactgtccccaattccagccaataaaatacgatcccataataatcaaccttaagtacaaaaggaggtttttggatgtttttggaactgctgcctccgatcggaatccacaggagcccttggaccctaagctattggacgtttttacaaatacagagcgtgagctaacatcagccttatttaacgaagaagtggaatcagacatacgtaaaaggaatcagttaacggctgctgatgagattaattacatttgttgtaattcaactttattgaagaattttttagacaactgcaatgttaatgtaaccgatgaagtaaaattggaaattaacgtacataggctaagcataactgcattcaccaaggccgtctacggcaaaaataacgaccttttaagaaatgcgttaagcatgagtaacactatcagtacgctcgatcttgagcattattgcttatttacaacaatcgaagatgaaaaacaagataagcgatcacatagtaagcgtagagagcatatgaaaagtataatattcaaattgaaggacttcaaaaacttcataacgataggtccatcctggaagactacccaggacggaaatgataatataagtttatggttttgccacccaggggaccctattcttatgcaaatgcaaaaaccgggcgtaaaattagaattggttgaagttactgacagtaacattaacgatgatattttagaaggaaaattcataaaaacagcaatctctggctccaaagaagaggccggactgaaagacaacaaagaaagctgcgaaagtccattaaaaagcaaaactgctttaaagagagaaaacctgccacactctgtggctggaactcgaaacagtcctttgaaagtgtcgtatctgacccctgataatggaagcacagttgctaagacctatagaaataacacggcaagaaaattattcgtggaagaacaaagccaaagtacgaattacgaacaagataagcggttccggcaggctagttcagttcatatgaacatgaatcgggaacaaagttttgacattggtacgactcatgaagtggcctgtccacgtaatgagagcaattctttaaaaagatccatagcagatatttgtaatgaaactgaagaccccacccaacaatctacatttgcaaaaagggcagacaccactgtgacatggggaaaagcgttaccagctgcagatgatgaggtttcatgcagcaatatcgatagaaaaggaatgctcaagaaagaaaaattgaagcatatgcaaggtctgttgaattcccagaatgacacaagtaatcacaagaaacaggacaataaagagatggaagatgggctgggtctaacacaagtagaaaagccaaggggtatatttgactaa

SEQ ID NO: 11052 - DNA, 1839 bp, Artificial Sequence
  Description of Artificial Sequence: Synthetic polynucleotide
atgagttttaaggcaactatcaccgagagtgggaagcagaatatctggtttcgtgcgatatatgtgttatctacaattcaggatgatatcaagattacagtgacaacaaatgagttaattgcttggtctatgaacgagacagatactactctttgtcaggttaggtttcagaaaagcttttttgaggagtatgagtttaaaccacatgagattgtatttggagaaaatggggttcaagttatagaagatacgtacggcaatagtcataagttatactccttccgtgttaatggaagacacttgacaactatatctagaaagccggatggtgatggcatcaaatctttcacaattgcggtaaacaacacttctacctgtcctgaatctcttgcaaatagattgattgtggtgattgaaatggattctttaatagtcaaagaatactgtccccaattccagccaataaaatacgatcccataataatcaaccttaagtacaaaaggaggtttttggatgtttttggaactgctgcctccgatagaaatccacaggagcccttggaccctaagttgttggacgtttttacaaatacagagcgtgagttgacatctgccttatttaacgaagaagtggaaagtgacatacgtaaaaggaatcagttaacggctgctgatgagattaattacatttgttgtaattctactttattgaagaattttttagacaactgcaatgttaatgtaaccgatgaagtaaaattggaaattaacgtacataggttgagcataactgcattcaccaaggccgtctacggcaaaaataacgaccttttaagaaatgcgttaagcatgagtaacactatcagtacgctcgatcttgagcattattgcttatttacaacaatcgaagatgaaaaacaagataagagaagccatagtaagcgtagagagcatatgaaaagtataatattcaaattgaaggacttcaaaaacttcataacgataggtccatcctggaagactacccaggacggaaatgataatataagtttatggttttgccacccaggggaccctattcttatgcaaatgcaaaaaccgggcgtaaaattagaattggttgaagttactgacagtaacattaacgatgatattttagaaggaaaattcataaaaacagcaatctctggctccaaagaagaggccggattgaaagacaacaaagaaagctgcgaaagtccattaaaaagcaaaactgctttaaagagagaaaacttaccacactctgtggctggaactagaaacagtcctttgaaagtgtcttatttgacccctgataatggaagcacagttgctaagacctatagaaataacacggcaagaaaattattcgtggaagaacaaagccaaagtacgaattacgaacaagataagagattcagacaggctagttctgttcatatgaacatgaatagagaacaaagttttgacattggtacgactcatgaagtggcctgtccacgtaatgagagcaattctttaaaaagatccatagcagatatttgtaatgaaactgaagaccccacccaacaatctacatttgcaaaaagggcagacaccactgtgacatggggaaaagcgttaccagctgcagatgatgaggtttcttgcagcaatatcgatagaaaaggaatgctcaagaaagaaaaattgaagcatatgcaaggtttattgaattcccagaatgacacaagtaatcacaagaaacaggacaataaagagatggaagatgggttaggtttaacacaagtagaaaagccaaggggtatatttgactga

SEQ ID NO: 11053 - DNA, 1146 bp, Saccharomyces cerevisiae
atgaattataataactttgaaaattcgaagggtgatggacattctaggcttcccaaacctacatactccggaacgctatcagatggctatgatgaatcgaaaattaaaaggcaaaaaacagactctgcttttaatgcagcttactcacctcatatgtatccgaactctccgtattatgaaggttcatggaataccggttatactcctcaacttcatcatgtagcccctcataatcaatatttccatccaatacaaccgtccactcagtacaattatacgagtcctcccaattatacagaaaattacataccgccagttcatcagaatatatcttatgcaccagcgcttaatttacagaagtggccatcatcatattgtgaaaacactcaagccttaaagaatgataaagattaccaaacatcaattagttatgaagatgttgcaataccgaccgtaaaggaaatacaattgattgagaaaaacagagggaaagatacgtttatgaatgaaataagtccagtaccatcaagcaaggatcaagcatctgcggagcctacagaaatcccaagaaaggatcccgagctggcaaattctaatgccgaagatgatcataataacttagggctagaagatgatgatcgtgatgagcagttagaatcagaggggttgggtaaggtggttttggttcctggaacctccatagcattgattactgatgaagatgttaaaaagtggagagaagaaagaaaaaaaatgtggctactgaaaatatccaataacaaacagaaacatatgcaagaaatgggcataaaggaagatgaactgaagagccaacctagcattttcaaagagtcaaggaaagaaaagcaatttatacagagtattcaaaatcaagtgcagagaggaaatccgaagattgacttgaacttgaaattgatacagcgagaattcgcaaacgaaaactcccaacttttggactttataagagaattgggagatgtaggattacttgaatatgagctatctcaacaagaaaaagatgtactttttgggagctctgaagataataataaaaatcattacaaaccaaattacaaaaacaggaaacctaatctgagtagagccaactttactagaaataagtaa

SEQ ID NO: 11054 - DNA, 1146 bp, Artificial Sequence
  Description of Artificial Sequence: Synthetic polynucleotide
atgaattataataactttgaaaattctaagggtgatggacattctaggcttcccaaacctacatactccggaacgttaagtgatggctatgatgaaagtaaaattaaaaggcaaaaaacagactctgcttttaatgcagcttactctcctcatatgtatccgaactctccgtattatgaaggttcttggaataccggttatactcctcaacttcatcatgtagcccctcataatcaatatttccatccaatacaaccgtccactcagtacaattatacgagtcctcccaattatacagaaaattacataccgccagttcatcagaatatatcttatgcaccagcgcttaatttacagaagtggccatcttcttattgtgaaaacactcaagccttaaagaatgataaagattaccaaacatccattagttatgaagatgttgcaataccgaccgtaaaggaaatacaattgattgagaaaaacagagggaaagatacgtttatgaatgaaataagtccagtaccatccagcaaggatcaagcatctgcggagcctacagaaatcccaagaaaggatcccgagttggcaaattctaatgccgaagatgatcataataacttagggttggaagatgatgatcgtgatgagcagttagaaagtgaggggttgggtaaggtggttttggttcctggaacctccatagcattgattactgatgaagatgttaaaaagtggagagaagaaagaaaaaaaatgtggttgttgaaaatatccaataacaaacagaaacatatgcaagaaatgggcataaaggaagatgaattgaagagccaacctagcattttcaaagagtccaggaaagaaaagcaatttatacagagtattcaaaatcaagtgcagagaggaaatccgaagattgacttgaacttgaaattgatacagagggaattcgcaaacgaaaactcccaacttttggactttataagagaattgggagatgtaggattacttgaatatgagctttctcaacaagaaaaagatgtactttttgggagctctgaagataataataaaaatcattacaaaccaaattacaaaaacaggaaacctaatttgagtagagccaactttactagaaataagtga

SEQ ID NO: 11055 - DNA, 402 bp, Saccharomyces cerevisiae
atgacagcaatgaaagaagacaacgctgcattgattacactgaagaaaaacaacgaccaagaaaaacttagagtgcataaactgacagatgcaagttcaaactctgctgatgggttcgttataaataaagccaaaaacggtggaccgcttaataaaaagtcattagttaataatgaacaacacattaagaaggctgtgtcgcctggtagagtcaggaagcacaaaacgacaacatcttccacaaaatcacgaacgaaaagtaagaaaaaagacgcttctgaaagtaaagtacagagagagaataagggttcattttaccaaggtgccattttcggttcgttccttggtgctgctgtaactactgttttaagtaacctagcagttaaagctcttcaaaattag

SEQ ID NO: 11056 - DNA, 402 bp, Artificial Sequence
  Description of Artificial Sequence: Synthetic polynucleotide
atgacagcaatgaaagaagacaacgctgcattgattacattgaagaaaaacaacgaccaagaaaaacttagagtgcataaattaacagatgcaagtagtaactctgctgatgggttcgttataaataaagccaaaaacggtggaccgcttaataaaaagtctttagttaataatgaacaacacattaagaaggctgtgtctcctggtagagtcaggaagcacaaaacgacaacatcttccacaaaatctaggacgaaaagtaagaaaaaagacgcttctgaaagtaaagtacagagagagaataagggttctttttaccaaggtgccattttcggttctttccttggtgctgctgtaactactgttttaagtaacttggcagttaaagctcttcaaaattga

SEQ ID NO: 11057 - DNA, 1083 bp, Saccharomyces cerevisiae
atggatttaagtttcacgactaaaagtgtcaaaattaatggtcaaaaccatcgaatattactgcaaaacgaaaacggaccttgtgccttgttagcacttgcaaatattctaatactttcaccagatcatacacgtttttccaatgagttaataaggttggtaaataagggaagtcaaatatctttaaaagaacttattgaagtcttagcagatatcgctttacaagttacagataaacctagtactgatataagtgagttactaagtttgttacctagattacatgaaggtttaaatattaaccctgagtttaatgggtcttttgaaaatactaaagagatgtcaatatttcgattgtttaacgttgatgttgtccatggctgggttatcaacagtttcataaatgaaaacattgatgagaaactatctcattattcttatgaatctgcgcagagaatcttaacacaagcagctgatataaattgtggaatttcccaagatgaaaactcggacgaagttttacgtgatgccatgcatttgggtctgtttttgaacgaatcaccgactcagttgaccgcctttggactcctacgattgagagaaaagctgctacacaacaaattctccattttattcagaaatgaccatttttctacattgttcaaatacgaagatcgattatacacattggttacggactttggttataaaaattgtaaagatattgtatggcaatccctagattcggtggacggctcctgcgatgctttttttgccggtaactttagtgcagcagaggtaaatggacagcaattgtcaactgacattgaacgtgattttggaactggaaatttgctacttgaagaaattcagcaaattgaaaacgataaagaactagccaaacagttacaggaacaagaacaagaacgtgttacgaaatttgaagcaaaaaggaaaatccattctcacaaaaaaaactcagaaatacacgcaccagtcaaaaaagacaagtttaagcgaagaagcagccttctcaatgcaaaagcttctgaaaaagagaaaagtgagtgcgttgttatgtaa

SEQ ID NO: 11058 - DNA, 1083 bp, Artificial Sequence
  Description of Artificial Sequence: Synthetic polynucleotide
atggatttaagtttcacgactaaaagtgtcaaaattaatggtcaaaaccatagaatattattacaaaacgaaaacggaccttgtgccttgttagcacttgcaaatattttaatactttctccagatcatacacgtttttccaatgagttaataaggttggtaaataagggaagtcaaatatctttaaaagaacttattgaagtcttagcagatatcgctttacaagttacagataaacctagtactgatataagtgagttattaagtttgttacctagattacatgaaggtttaaatattaaccctgagtttaatgggtcttttgaaaatactaaagagatgagtatatttagattgtttaacgttgatgttgtccatggctgggttatcaacagtttcataaatgaaaacattgatgagaaattatctcattattcttatgaatctgcgcagagaatcttaacacaagcagctgatataaattgtggaatttcccaagatgaaaacagcgacgaagttttacgtgatgccatgcatttgggtttatttttgaacgaatctccgactcagttgaccgcctttggactcttaagattgagagaaaagttattacacaacaaattctccattttattcagaaatgaccatttttctacattgttcaaatacgaagatagattatacacattggttacggactttggttataaaaattgtaaagatattgtatggcaatccttggattctgtggacggctcctgcgatgctttttttgccggtaactttagtgcagcagaggtaaatggacagcaattgtctactgacattgaacgtgattttggaactggaaatttgttacttgaagaaattcagcaaattgaaaacgataaagaattggccaaacagttacaggaacaagaacaagaacgtgttacgaaatttgaagcaaaaaggaaaatccattctcacaaaaaaaactctgaaatacacgcaccagtcaaaaaagacaagtttaagagaagaagcagccttctcaatgcaaaagcttctgaaaaagagaaaagtgagtgcgttgttatgtga

SEQ ID NO: 11059 - DNA, 2409 bp, Saccharomyces cerevisiae
atgtcagatgaaaaccataacagtgatgttcaagatattccttcacctgaactatccgtcgatagtaactctaacgagaatgaattgatgaataactcaagcgcagacgatggaatcgaatttgacgccccagaggaagaaagagaagccgaaagggaggaggaaaatgaagaacaacacgaactggaagatgtgaacgatgaagaggaggaagataaggaggaaaaaggagaggaaaacggggaagtaataaacacagaagaagaagaagaagaagaacatcaacaaaaaggcggaaatgatgatgacgatgatgataatgaagaggaagaagaggaagaagaggatgatgacgatgatgatgatgacgacgatgatgatgaagaagaagaagaagaagaagaagaagaaggcaacgacaacagttcggtaggctcagatagtgccgctgaagacggtgaggatgaggaagacaaaaaggataaaaccaaagataaagaggtcgaacttcgccgtgaaacattggaaaaagaacaaaaggacgtagatgaagctataaaaaaaataactcgtgaagaaaatgataatactcactttccaactaatatggaaaatgttaattacgatcttttacaaaagcaagtcaagtacattatggacagtaacatgctaaatttgcctcagtttcaacatttacctcaagaagaaaagatgtctgcgattttagcaatgttaaattcaaattctgacacagctctttccgtacctcctcatgatagtactatctcaacaacagctagcgcctcagccacaagcggcgcaagaagcaatgatcaaagaaaacctccattgtcagatgcccaaagacgtatgagatttcctagggcggatttatctaagccgattaccgaagaagaacacgaccgttatgcagcctatttgcacggtgaaaataaaatcaccgagatgcacaatattcctccgaagtcaagattattcattggtaatttgccgctaaagaacgtttctaaggaggatttatttaggattttctctccatacggtcatatcatgcaaatcaatatcaaaaatgcctttggattcattcagtttgacaaccctcaaagcgttagagatgcaattgaatgcgagtctcaagaaatgaactttggcaaaaagttgatcctggaagtttctagctcgaatgctcgtcctcaatttgatcatggtgatcacggtacaaacagtagttctacttttatttcttccgcaaaacgaccatttcaaactgaatctggtgacatgtacaatgacgacaatggtgctggctacaagaaatccagaagacacaccgtttcttgcaacattttcgttaaaagaaccgcagatcgtacgtatgccattgaggttttcaacaggtttagggacgggactggtttggaaactgatatgattttcttgaaaccaagaatggaactgggaaagcttatcaatgatgccgcatataatggggtgtggggcgttgttttagttaataaaacacacaatgtagatgttcaaactttctacaaaggctcacaaggtgaaacgaaatttgatgaatatattagcatatccgctgatgacgcagttgccatttttaataacatcaaaaacaacagaaataattctcgtcctactgattaccgtgctatgagccatcagcaaaacatatatggcgctcctcctcttcctgttccaaacggcccagctgtcggacctcctcctcaaacaaactattaccagggttacagtatgcctcctccacaacaacaacagcaacagccatatggtaattatgggatgccaccaccatcccatgaccaaggatatggttctcaacctccaattccaatgaatcagagctacggtcgctaccagacttctattccaccaccacctccacaacaacaaattcctcaagggtatggtcgttatcaggctggtccgcctcctcaaccaccttctcaaactccaatggaccagcaacaactattatctgccattcaaaaccttccacctaacgttgtatcgaatttgctttcaatggcccaacaacagcaacaacaacctcatgctcagcagcaattggttggtttaatacaatcaatgcaaggccaggctcctcaacaacagcaacaacagttgggtggatattcctctatgaactcatcctctccccctcctatgagtaccaattacaatggtcaaaatatatctgcaaaaccctctgccccaccaatgtcacaccaacctccgccacctcaacaacaacaacaacaacaacaacagcaacagcaacagcaacagcaacctgctggcaataatgttcaaagtctattagatagtttagcaaaactacaaaaatag

SEQ ID NO: 11060 - DNA, 2409 bp, Artificial Sequence
  Description of Artificial Sequence: Synthetic polynucleotide
atgagtgatgaaaaccataacagtgatgttcaagatattccttctcctgaattatccgtcgatagtaactctaacgagaatgaattgatgaataactccagcgcagacgatggaatcgaatttgacgccccagaggaagaaagagaagccgaaagggaggaggaaaatgaagaacaacacgaattggaagatgtgaacgatgaagaggaggaagataaggaggaaaaaggagaggaaaacggggaagtaataaacacagaagaagaagaagaagaagaacatcaacaaaaaggcggaaatgatgatgacgatgatgataatgaagaggaagaagaggaagaagaggatgatgacgatgatgatgatgacgacgatgatgatgaagaagaagaagaagaagaagaagaagaaggcaacgacaacagttctgtaggcagtgatagtgccgctgaagacggtgaggatgaggaagacaaaaaggataaaaccaaagataaagaggtcgaacttcgccgtgaaacattggaaaaagaacaaaaggacgtagatgaagctataaaaaaaataactcgtgaagaaaatgataatactcactttccaactaatatggaaaatgttaattacgatcttttacaaaagcaagtcaagtacattatggacagtaacatgttgaatttgcctcagtttcaacatttacctcaagaagaaaagatgtctgcgattttagcaatgttaaatagtaattctgacacagctctttccgtacctcctcatgatagtactatcagtacaacagctagcgcctctgccacaagcggcgcaagaagcaatgatcaaagaaaacctccattgagtgatgcccaaagacgtatgagatttcctagggcggatttatctaagccgattaccgaagaagaacacgaccgttatgcagcctatttgcacggtgaaaataaaatcaccgagatgcacaatattcctccgaagtctagattattcattggtaatttgccgttgaagaacgtttctaaggaggatttatttaggattttctctccatacggtcatatcatgcaaatcaatatcaaaaatgcctttggattcattcagtttgacaaccctcaaagcgttagagatgcaattgaatgcgagtctcaagaaatgaactttggcaaaaagttgatcttggaagtttctagcagtaatgctcgtcctcaatttgatcatggtgatcacggtacaaacagtagttctacttttatttcttccgcaaaaaggccatttcaaactgaatctggtgacatgtacaatgacgacaatggtgctggctacaagaaatccagaagacacaccgtttcttgcaacattttcgttaaaagaaccgcagatcgtacgtatgccattgaggttttcaacaggtttagggacgggactggtttggaaactgatatgattttcttgaaaccaagaatggaattaggaaagcttatcaatgatgccgcatataatggggtgtggggcgttgttttagttaataaaacacacaatgtagatgttcaaactttctacaaaggctctcaaggtgaaacgaaatttgatgaatatattagcatatccgctgatgacgcagttgccatttttaataacatcaaaaacaacagaaataattctcgtcctactgattaccgtgctatgagccatcagcaaaacatatatggcgctcctcctcttcctgttccaaacggcccagctgtcggacctcctcctcaaacaaactattaccagggttacagtatgcctcctccacaacaacaacagcaacagccatatggtaattatgggatgccaccaccatcccatgaccaaggatatggttctcaacctccaattccaatgaatcagagctacggtcgctaccagacttctattccaccaccacctccacaacaacaaattcctcaagggtatggtcgttatcaggctggtccgcctcctcaaccaccttctcaaactccaatggaccagcaacaattattatctgccattcaaaaccttccacctaacgttgtatctaatttgctttctatggcccaacaacagcaacaacaacctcatgctcagcagcaattggttggtttaatacaatctatgcaaggccaggctcctcaacaacagcaacaacagttgggtggatattcctctatgaactcttcctctccccctcctatgagtaccaattacaatggtcaaaatatatctgcaaaaccctctgccccaccaatgtctcaccaacctccgccacctcaacaacaacaacaacaacaacaacagcaacagcaacagcaacagcaacctgctggcaataatgttcaaagtttgttagatagtttagcaaaattacaaaaatga

SEQ ID NO: 11061 - DNA, 207 bp, Saccharomyces cerevisiae
atgagagcagtcactagaaacaaaatagtcaataacctatacttttctacatttctcattgcattcgcatcagtggccatcggttctgtgctgccatgtccagcacattcagtggattctgattcaccagctgtacagcaacacaagcttcagcttgctcatgagcaggagttaaagaggaaggatgctttaagtaaaaagatttaa

SEQ ID NO: 11062 - DNA, 207 bp, Artificial Sequence
  Description of Artificial Sequence: Synthetic polynucleotide
atgagagcagtcactagaaacaaaatagtcaataacctttacttttctacatttctcattgcattcgcatctgtggccatcggttctgtgttaccatgtccagcacattctgtggattctgattctccagctgtacagcaacacaagcttcagcttgctcatgagcaggagttaaagaggaaggatgctttaagtaaaaagatttga

SEQ ID NO: 11063 - DNA, 1830 bp, Saccharomyces cerevisiae
atgtcgatgttaagaatctggagttgcatcgtacatttcttttccgtgcaggcacttgattcacgaataaagccagacattgaattcaaaaggcgacaaaggatatttatcaattcatctaaagaagagaatggttcatcttctagtgccgttactgttacccgtaaccctgtgctcagctctaatagcccatctcctccgctatggaatacatgggaatttagactatattatttggcgttcaccgtagtagttcctttcatgataaaggcggcattggctacgagctccgagtctaatccaaactactataaattcagcggactgctagcccatggttggattctgggccgcaaagtggataacagcgatcctcagtataggttttttagatccaatttttttttgttggccatcttaatattactacaaattatattaaaaaaggtttttgttaaatttagtaaaattccgaaaacaaaattcgattttgcgtgtggattagtttttgtctgtttcatgtacgggatcaattctgttaagctctttacgcatgcttttattttcttcactttggcacattcgctaaagagaaagcgtttgatagccgcttttgcgatttggtcctatggtatctttacactattcatcaatcaaaaaatgaaaaatctcccctttaataatattgctatcatcctaagtcccatggatcaatggtataagggtatcgttcctcgatgggatttttttttcaattttacattattgcgtttgttaagttactccatggattttttggaaagatggcatgaacaattgagccgccaaccttcgatagattacgatgatagacgacctgaattcagaaaaagtttatctggttctactctacaaaccatttatgagtcaggtaagaatgttctggaggaaaaggaacgactggtagcagaacatcacatccaggattacaactttatcaattttatcgcttatattacttacgcgccattgtttttagtgggcccaattatcacttttaatgactacctttatcaatcagaaaataagcttccttcgctaacgaaaaaaaacataggcttctatgccctcaaagtattttcgagtttgcttttgatggaaattatcctacattatatctatgtgggtgcaatagcaaggaccaaggcatggaacaatgatacacccttgcaacaggctatgatcgcgctgttcaacttgaacattatgtatttaaaacttttgatcccatggaggctctttcggctgtgggccatggtcgatggtattgatgcacctgaaaatatgctacgatgtgtggataataattatagtacagtgggattctggagagcctggcatacaagttttaacaagtgggtaatccgttacatctatgttccatttggcgggtccaataacaaaatattaacgagctttgccgtattctcatttgtagcaatatggcatgacatccaattacgagtgttgttttgggggtggttaacagtccttttattattaggcgaaacctacattactaactgttttagtagatatagattcagaagctggtacaggtttgtttgcggtatcggtgctgcaataaatatttgcatgatgatgattattaatgtctatggattttgcttgggtgcagagggaacgaagcttctattgaagggcatatttaacaattcacatagtccggagtttttgactgcggtaatggtaagcctatttattgctgttcaggtaatgtttgagattagagaagaagaaaaaagacatggcatcaacttgaaatgttga

SEQ ID NO: 11064 - DNA, 1830 bp, Artificial Sequence
  Description of Artificial Sequence: Synthetic polynucleotide
atgtccatgttaagaatctggagttgcatcgtacatttcttttccgtgcaggcacttgattctagaataaagccagacattgaattcaaaaggagacaaaggatatttatcaattcttctaaagaagagaatggttcttcttctagtgccgttactgttacccgtaaccctgtgctcagctctaatagcccatctcctccgttatggaatacatgggaatttagattatattatttggcgttcaccgtagtagttcctttcatgataaaggcggcattggctacgagctccgagtctaatccaaactactataaattcagcggattattagcccatggttggattttgggccgcaaagtggataacagcgatcctcagtataggttttttagatccaatttttttttgttggccatcttaatattattacaaattatattaaaaaaggtttttgttaaatttagtaaaattccgaaaacaaaattcgattttgcgtgtggattagtttttgtctgtttcatgtacgggatcaattctgttaagctctttacgcatgcttttattttcttcactttggcacattctttgaagagaaagcgtttgatagccgcttttgcgatttggtcctatggtatctttacattgttcatcaatcaaaaaatgaaaaatctcccctttaataatattgctatcatcttaagtcccatggatcaatggtataagggtatcgttcctcgttgggatttttttttcaattttacattattgcgtttgttaagttactccatggattttttggaaagatggcatgaacaattgagccgccaaccttccatagattacgatgatagaagacctgaattcagaaaaagtttatctggttctactttacaaaccatttatgagtctggtaagaatgttttggaggaaaaggaaagattggtagcagaacatcacatccaggattacaactttatcaattttatcgcttatattacttacgcgccattgtttttagtgggcccaattatcacttttaatgactacctttatcaaagtgaaaataagcttccttctttgacgaaaaaaaacataggcttctatgccctcaaagtattttctagtttgcttttgatggaaattatcttgcattatatctatgtgggtgcaatagcaaggaccaaggcatggaacaatgatacacccttgcaacaggctatgatcgcgttattcaacttgaacattatgtatttaaaacttttgatcccatggaggctctttagattatgggccatggtcgatggtattgatgcacctgaaaatatgttaagatgtgtggataataattatagtacagtgggattctggagagcctggcatacaagttttaacaagtgggtaatccgttacatctatgttccatttggcgggtccaataacaaaatattaacgagctttgccgtattctcctttgtagcaatatggcatgacatccaattaagagtgttgttttgggggtggttaacagtccttttattattaggcgaaacctacattactaactgttttagtagatatagattcagaagctggtacaggtttgtttgcggtatcggtgctgcaataaatatttgcatgatgatgattattaatgtctatggattttgcttgggtgcagagggaacgaagcttttattgaagggcatatttaacaattctcatagtccggagtttttgactgcggtaatggtaagcttgtttattgctgttcaggtaatgtttgagattagagaagaagaaaaaagacatggcatcaacttgaaatgttga

SEQ ID NO: 11065 - DNA, 1245 bp, Saccharomyces cerevisiae
atgtttgtcagggttaaattgaataaaccagtaaaatggtataggttctatagtacgttggattcacattccctaaagttacagagcggctcgaagtttgtaaaaataaagccagtaaataacttgaggagtagttcatcagcagatttcgtgtccccaccaaattccaaattacaatctttaatctggcagaaccctttacaaaatgtttatataactaaaaaaccatggactccatccacaagagaagcgatggttgaattcataactcatttacatgagtcataccccgaggtgaacgtcattgttcaacccgatgtggcagaagaaatttcccaggatttcaaatctcctttggagaatgatcccaaccgacctcatatactttatactggtcctgaacaagatatcgtaaacagaacagacttattggtgacattgggaggtgatgggactattttacacggcgtatcaatgttcggaaatacgcaagttcctccggttttagcatttgctctgggcactctgggctttctatcaccgtttgattttaaggagcataaaaaggtctttcaggaagtaatcagctctagagccaaatgtttgcatagaacacggctagaatgtcatttgaaaaaaaaggatagcaactcatctattgtgacccatgctatgaatgacatattcttacataggggtaattcccctcatctcactaacctggacattttcattgatggggaatttttgacaagaacgacagcagatggtgttgcattggccactccaacgggttccacagcatattcattatcagcaggtggatctattgtttccccattagtccctgctattttaatgacaccaatttgtcctcgctctttgtcattccgaccactgattttgcctcattcatcccacattaggataaagataggttccaaattgaaccaaaaaccagtcaacagtgtggtaaaactttctgttgatggtattcctcaacaggatttagatgttggtgatgaaatttatgttataaatgaggtcggcactatatacatagatggtactcagcttccgacgacaagaaaaactgaaaatgactttaataattcaaaaaagcctaaaaggtcagggatttattgtgtcgccaagaccgagaatgactggattagaggaatcaatgaacttttaggattcaattctagctttaggctgaccaagagacagactgataatgattaa

SEQ ID NO: 11066 - DNA, 1245 bp, Artificial Sequence
  Description of Artificial Sequence: Synthetic polynucleotide
atgtttgtcagggttaaattgaataaaccagtaaaatggtataggttctatagtacgttggattctcattccttgaagttacagagcggctccaagtttgtaaaaataaagccagtaaataacttgaggagtagttcttctgcagatttcgtgtccccaccaaattccaaattacaatctttaatctggcagaaccctttacaaaatgtttatataactaaaaaaccatggactccatccacaagagaagcgatggttgaattcataactcatttacatgagagttaccccgaggtgaacgtcattgttcaacccgatgtggcagaagaaatttcccaggatttcaaatctcctttggagaatgatcccaacagacctcatatactttatactggtcctgaacaagatatcgtaaacagaacagacttattggtgacattgggaggtgatgggactattttacacggcgtatctatgttcggaaatacgcaagttcctccggttttagcatttgctttgggcactttgggctttttatctccgtttgattttaaggagcataaaaaggtctttcaggaagtaatcagctctagagccaaatgtttgcatagaacaaggttagaatgtcatttgaaaaaaaaggatagcaactcttctattgtgacccatgctatgaatgacatattcttacataggggtaattcccctcatctcactaacttggacattttcattgatggggaatttttgacaagaacgacagcagatggtgttgcattggccactccaacgggttccacagcatattctttaagtgcaggtggatctattgtttccccattagtccctgctattttaatgacaccaatttgtcctcgctctttgagtttcagaccattgattttgcctcattcttcccacattaggataaagataggttccaaattgaaccaaaaaccagtcaacagtgtggtaaaactttctgttgatggtattcctcaacaggatttagatgttggtgatgaaatttatgttataaatgaggtcggcactatatacatagatggtactcagcttccgacgacaagaaaaactgaaaatgactttaataattctaaaaagcctaaaaggagcgggatttattgtgtcgccaagaccgagaatgactggattagaggaatcaatgaacttttaggattcaattctagctttaggttgaccaagagacagactgataatgattga

SEQ ID NO: 11067 - DNA, 498 bp, Saccharomyces cerevisiae
atgagatttccttcaatttttactgcagttttattcgcagcatcctccgcattagctgctccagtcaacactacaacagaagatgaaacggcacaaattccggctgaagctgtcatcggttacttagatttagaaggggatttcgatgttgctgttttgccattttccaacagcacaaataacgggttattgtttataaatactactattgccagcattgctgctaaagaagaaggggtatctttggataaaagagaggctgaagcttggcattggttgcaactaaaacctggccaaccaatgtacaagagagaagccgaagctgaagcttggcattggctgcaactaaagcctggccaaccaatgtacaaaagagaagccgacgctgaagcttggcattggctgcaactaaagcctggccaaccaatgtacaaaagagaagccgacgctgaagcttggcattggttgcagttaaaacccggccaaccaatgtactaa

SEQ ID NO: 11068 - DNA, 498 bp, Artificial Sequence
  Description of Artificial Sequence: Synthetic polynucleotide
atgagatttccttctatttttactgcagttttattcgcagcatcctccgcattagctgctccagtcaacactacaacagaagatgaaacggcacaaattccggctgaagctgtcatcggttacttagatttagaaggggatttcgatgttgctgttttgccattttccaacagcacaaataacgggttattgtttataaatactactattgccagcattgctgctaaagaagaaggggtatctttggataaaagagaggctgaagcttggcattggttgcaattgaaacctggccaaccaatgtacaagagagaagccgaagctgaagcttggcattggttacaattgaagcctggccaaccaatgtacaaaagagaagccgacgctgaagcttggcattggttacaattgaagcctggccaaccaatgtacaaaagagaagccgacgctgaagcttggcattggttgcagttaaaacccggccaaccaatgtactga

SEQ ID NO: 11069 - DNA, 915 bp, Saccharomyces cerevisiae
atggtcaccattgtatttgatcatccggcggaagactttccagagttgaagatcgctggggagtttaccaattgggaaggtgtacccatgaaaataaataccagtagcgggaaatgggaatacaaatttgatgaatcttcggtaaccaaacataatgataaagataaggtacatttcaaatttatagatcagaacggtaactggtttgccgatgatgagtatccaaaggaggtggacgagcacagcaatgaaaacaatgttgctactttaaataacgaagaggacggcggaagcgctggtgaagaaaaggacgagggcgacaaaactgcacacaatacaaatgaaaatgggtcagagttgtactatgagggccctgagacgccaactccttctttaaaaggtaatgtaacgtttccttcccctaaaacagctatttcgcaagatggttctgcttttgcaaaagagactaccaggaaagaaagaaagtatgaacatgctccattgaacgaagttccagtagaaagagatccaaaagaagagaataaggagctctctccaaacttttctcaggaacagacagagaataaacaggacaaaggtttagacaatctatctgaaggtaatgataatgataacacaagagttaatgaagatacagacgtcaccgacacgcaagaatcagaacatgagatcaacggttctgatactgaaaatacggatatgtccgaacaagaagaaatacagaaaatagataaacccgccgatcaaaacgctaagtcaattgtaaaagaaggcgatgccaatactgaagattatgaaagtgttttgaaaaagctactgggagcgttaggacgcttttttggctcatggttttcttggttgacaacgaaaatgtcaagctcagaggcatcataa

SEQ ID NO: 11070 - DNA, 915 bp, Artificial Sequence
  Description of Artificial Sequence: Synthetic polynucleotide
atggtcaccattgtatttgatcatccggcggaagactttccagagttgaagatcgctggggagtttaccaattgggaaggtgtacccatgaaaataaataccagtagcgggaaatgggaatacaaatttgatgaatcttctgtaaccaaacataatgataaagataaggtacatttcaaatttatagatcagaacggtaactggtttgccgatgatgagtatccaaaggaggtggacgagcacagcaatgaaaacaatgttgctactttaaataacgaagaggacggcggaagcgctggtgaagaaaaggacgagggcgacaaaactgcacacaatacaaatgaaaatgggagtgagttgtactatgagggccctgagacgccaactccttctttaaaaggtaatgtaacgtttccttcccctaaaacagctatttctcaagatggttctgcttttgcaaaagagactaccaggaaagaaagaaagtatgaacatgctccattgaacgaagttccagtagaaagagatccaaaagaagagaataaggagctctctccaaacttttctcaggaacagacagagaataaacaggacaaaggtttagacaatttatctgaaggtaatgataatgataacacaagagttaatgaagatacagacgtcaccgacacgcaagaaagtgaacatgagatcaacggttctgatactgaaaatacggatatgtccgaacaagaagaaatacagaaaatagataaacccgccgatcaaaacgctaagtctattgtaaaagaaggcgatgccaatactgaagattatgaaagtgttttgaaaaagttattaggagcgttaggacgcttttttggctcctggttttcttggttgacaacgaaaatgtctagctctgaggcatcttga

SEQ ID NO: 11071 - DNA, 1839 bp, Saccharomyces cerevisiae
atggtggtttcttataacaataataataacaataacaataacaataacaataataatatcagtaataataataacaataataacatgttccctccttttccttcttccgatgactttgcaatgtatcaacagtccagttcttccggcccttaccaagaaacttatgcgagtggccctcaaaactttggcgatgctgtgtatcctatgaatggtaattttactcttttaccatccgactttacacgagagcctaatgattcgttcttttacgagaatgacggaatttttgattatcagcgtattcaacagcaaccaactcaattccagacaaagcagcgaaatgattcacaacagcaacggttttcacaggaacaaaatttcgaaattgataacgaagttgtccacaataacaatcgttattatgaatatgaaaggtcatcaaatgaagtctctccttttgatgatgagaatccaaatgtgttatctgatggcatgtcacccactattatggcaactgcaactgcagtaaccaacgcaaatgcgcctttaccagttaatgcacaagccaataatcctttgaattttacatcggccccaagtagaactgtttatttgggtaatgtgccaccaaacctaagcgttaaagagttattggatcatgtcagaagtggtgtcgttgaagacgtcaaaatcatacctgaaaagatgtgtgcattcgtttcgtttatagatgaaagtgctgcactattgttccattcagacgcaattttaaagcgcttgaacatcggtgacagggatatcaaaatcgggtgggggaaaccaactcgaattgatcctattgtagcggctagaatctctacggacggtgccacaagaaatgtatacattggccgtatgacgattgaaggcgaagaatcacatttatctgaggagcaattgagggttgatttagaagaatatggtgaaattgactgtataaaaattatcaaggaaaagggaatcgcctttattcattttgcgtctattttaaatgctataaaagtggttacgaatctgccaattagaaatccatactatcaaaataagagaatattttatggaaaggacagatgtgcatttattaccaaaactcaacaacataatgcggctcaatttctaggtgtacaacctggtatggaacatatgatagagttttctgatcgtgaatttatatctaacgctttgttacaacagtctgctgctgctgctgcaattgctacatctgcgggcggccccaataacttgggtaacaggactgtttacctgggcagcttgcctaaggatgttaaaattgaagaaatatgtaatgcagttcgtggaggtttattacaaagtataaaactattgaacgatcgatacgtctgttttgtaacattcattgatcctactgctgctgcgcagttttatgcaatgagttctttgtatggattcacagtccagaaaaaacgttgcaaagtcggctggggtaaacactccggcccattaccaaatgcgctcgccttggcagtcagtaatggtgcctcaagaaatgtttatgtgggtaatattgattttgtcggcgattccctaagagatgaacgtgtcttcaccgaaagcaacttaagacatatctttcagcaatatggggaagtggaacaaatcaatttcttgcctgagaagaactgttgtttcatcaattatactaacatcagtaatgctattttagccttagacaagattaagtctaacccctatttcaaagatctcaaaataaactttggcaaggatagatgtggtaacgtcccccaccaatcacgttaa

SEQ ID NO: 11072 - DNA, 1839 bp, Artificial Sequence
  Description of Artificial Sequence: Synthetic polynucleotide
atggtggtttcttataacaataataataacaataacaataacaataacaataataatatcagtaataataataacaataataacatgttccctccttttccttcttccgatgactttgcaatgtatcaacagtccagttcttccggcccttaccaagaaacttatgcgagtggccctcaaaactttggcgatgctgtgtatcctatgaatggtaattttactcttttaccatccgactttacaagagagcctaatgattctttcttttacgagaatgacggaatttttgattatcagcgtattcaacagcaaccaactcaattccagacaaagcagagaaatgattctcaacagcaaagattttcccaggaacaaaatttcgaaattgataacgaagttgtccacaataacaatcgttattatgaatatgaaaggagtagtaatgaagtctctccttttgatgatgagaatccaaatgtgttatctgatggcatgtctcccactattatggcaactgcaactgcagtaaccaacgcaaatgcgcctttaccagttaatgcacaagccaataatcctttgaattttacatctgccccaagtagaactgtttatttgggtaatgtgccaccaaacttgagcgttaaagagttattggatcatgtcagaagtggtgtcgttgaagacgtcaaaatcatacctgaaaagatgtgtgcattcgtttcttttatagatgaaagtgctgcattattgttccattctgacgcaattttaaagcgcttgaacatcggtgacagggatatcaaaatcgggtgggggaaaccaactagaattgatcctattgtagcggctagaatctctacggacggtgccacaagaaatgtatacattggccgtatgacgattgaaggcgaagaaagtcatttatctgaggagcaattgagggttgatttagaagaatatggtgaaattgactgtataaaaattatcaaggaaaagggaatcgcctttattcattttgcgtctattttaaatgctataaaagtggttacgaatttaccaattagaaatccatactatcaaaataagagaatattttatggaaaggacagatgtgcatttattaccaaaactcaacaacataatgcggctcaatttttaggtgtacaacctggtatggaacatatgatagagttttctgatcgtgaatttatatctaacgctttgttacaacagtctgctgctgctgctgcaattgctacatctgcgggcggccccaataacttgggtaacaggactgtttacttgggcagcttgcctaaggatgttaaaattgaagaaatatgtaatgcagttcgtggaggtttattacaaagtataaaacttttgaacgatagatacgtctgttttgtaacattcattgatcctactgctgctgcgcagttttatgcaatgagttctttgtatggattcacagtccagaaaaaacgttgcaaagtcggctggggtaaacactccggcccattaccaaatgcgctcgccttggcagtcagtaatggtgcctctagaaatgtttatgtgggtaatattgattttgtcggcgattccttgagagatgaacgtgtcttcaccgaaagcaacttaagacatatctttcagcaatatggggaagtggaacaaatcaatttcttgcctgagaagaactgttgtttcatcaattatactaacatcagtaatgctattttagccttagacaagattaagtctaacccctatttcaaagatctcaaaataaactttggcaaggatagatgtggtaacgtcccccaccaatcccgttga

SEQ ID NO: 11073 - DNA, 282 bp, Saccharomyces cerevisiae
atgtttttacagactctccgcctaactatgccaaggatgtttttgcacatgaaaccgtcccccataacgataacaagggcctgcacagtgcccagcctcctatctgttgcagctccgcaaccagctcttgttgcagctaacagacctttggtttttaacagaggtttcaaggtcagaacatctgtcaaaaagttctgcagtgattgctacttggtaagaagaaagggaagagtatacatttattgcaagtcgaataaaaaacacaaacagcgtcaaggctga

SEQ ID NO: 11074 - DNA, 282 bp, Artificial Sequence
  Description of Artificial Sequence: Synthetic polynucleotide
atgtttttacagactctccgcttgactatgccaaggatgtttttgcacatgaaaccgtcccccataacgataacaagggcctgcacagtgcccagcctcttatctgttgcagctccgcaaccagctcttgttgcagctaacagacctttggtttttaacagaggtttcaaggtcagaacatctgtcaaaaagttctgcagtgattgctacttggtaagaagaaagggaagagtatacatttattgcaagagcaataaaaaacacaaacagcgtcaaggctga

SEQ ID NO: 11075 - DNA, 3042 bp, Saccharomyces cerevisiae
atgaaggacttgtctcattatggtcctgcgctatgtgttaaattttacaatgattatgttctagctggttatgggcctttcatccatgtctatgactatcattcggctacgttgattaacaaatgtaggctatttcactacaataaagttcatggacttagcctttctagtgaagggaaaattttggcctatggtgcaagatcagtaacaatagtggaacttgaagacgttttaaagaaagagtcattggtggatttcgaaaggattaactcagattggattaccggtgctacattcagctttgacaacttgcaaatatatttgttaacatgttataataaagtgctaatttgtgatttaaattgtgaagttctttttaggaagtctcttgggggagaaagatctattctatattccggtataattaaagttttcggtccggataaagtatatgttaacgctggtactgtaatgggcggtgttatcatttgggacctgttctcggagacaaaaattcataacttactgggtcatgaaggttctatcttttatgttaatttaagcaacaacggaagatatgttgccagttgctctgacgacagatcaattagactgtgggatttagaaactggcaagcagctgtctgttggctggagccatacggcaagaatatggaatttaatgttttttgataatgattcaaaactaataagtgtttctgaagattgcacatgccgtgtatggaacattatcgaatcacgagaaaacgttgccgaattatccatatctaacgtttacgaagtacatttaatcaagagtatatggggcgttgatgtgaaagacgacgaaatgatagctgtaacctccgggaatgatggtaggttaaagctgattgatcttcttcaactgaagagacacggcgatgaagaaacatcgttcagtctagatgatatcgcaaagcaatgtggcgatattttcgaaaagaatgaaagtatcaagggatttcaatggttttcattcggtgtaattgctatcacttcattgggtaaaatacttaaatacagtgatgtcacgaaacaatggaagttgttactaacaaatgaaaaattcaactcgtatccaattacaaatgggattcaaacgcaaaatatcgctgtcttttccaataataaaagtgacatccttcttatcaaatttagcaaagatagcgctgacataattgagaccgaagaattccatttagatgagctttctaagacaaataactgtctcgttacagaatacgatgatgactccttcctattgactttacaatccccaaatcctcgagagaagtttgtatgtttggaaataagccttcagaacttaaaaattaaaagcaagcactgtttcaataagccggaaaatttttcttcctcatgtttgacctccttccgaaatcatattttagtcggctcacgttttagtacattagtaatctacaacttacttgatgagagcgaggagcccttcataattaggagattaagtcccggagacactacaacctcaatcgaatttgtagaagataaagacaactctgcggtcttctcagtaacaaatagggatggctattatgtatttattgagttgacgaaaaacagtttggaagagggtccctaccgactaagttataaggtcttgcattctaataagatgatgaaaggtttcttggagggcgctttctttaattcaaaaggtgaatacattacttatgggttcaagtccagcttgttttatctctacaatgaaaccaactgttatgaactagctagtgaagtttgtggtggttcccatcgtctgtggaatctcgcaaaaattactgatggccacgtattaatgtatattaaggcatcccgatttcatttaaggaaaatttacaactccattgtgcctgaaactttagaaaatggtgtacacggaagggaaatcagagatatttcaatctgtcctgtttcaaataccaacacgaatgacaattttaaggatgggcatatattctgtactgcatctgaagatactacaattaagctgggatattttaacaatagaacagggaaggtgcagaatttttggacacaaagaaagcatgtgtctggattacaacgttgtcagtttataaatcacaaactaatgatatcatcttcagctagagaggagttattcttatgggaattgaacgataagtataataaacgaccatatatgaccatacgacaagctttacctgtatccacaaataattctgatctaaggatcatggattttgatgtcaaatttatatcacagtcaggtgacttcttattagttactgtttattcagattcaacaataaagatttggcactatagggaaaatcagaataagtttgacctgatcatgcaaggtcgttataagacgtgctgtttattcaacgtcgtatttattgcactgaaagaagagctccttgttgtcatttcaccaactgatggacatttagtggtttataatataaccgagtacgtaccattttccgttgatccgatttctggcgatttggttgaccacaaactggacgctactatctcaaatcttcccgcacctgtagcgcagttgccggtacatcaatctggtgtcaagtccctagactatgttgctaatgctacaagaacttccgccacaattttgacagggggtgatgataatggtttagggttaagcaacctgaaattagatgactcgaataaagtaacgttaaaaacaagtgactttatcgctgcagcagcttcttcgacaataacgtccggtatgttgattaatggtggcaaagaagtcattaccacatcggttgatcaagtaatacgcgcttgggaaattaccgcaggcaagctttcactggtagataaaaagcgtaccactgtggcggatacaggatcattagaaatcatttccaatgatgaagatgctgattctgagaaaacgttactgatcggaggtgttggtttatcaatttggaaaaaatga

SEQ ID NO: 11076 - DNA, 3042 bp, Artificial Sequence
  Description of Artificial Sequence: Synthetic polynucleotide
atgaaggacttgtctcattatggtcctgcgttatgtgttaaattttacaatgattatgttttggctggttatgggcctttcatccatgtctatgactatcattctgctacgttgattaacaaatgtaggttatttcactacaataaagttcatggacttagcctttctagtgaagggaaaattttggcctatggtgcaagatctgtaacaatagtggaacttgaagacgttttaaagaaagagtctttggtggatttcgaaaggattaacagtgattggattaccggtgctacattcagctttgacaacttgcaaatatatttgttaacatgttataataaagtgttgatttgtgatttaaattgtgaagttctttttaggaagtctcttgggggagaaagatctattctttattccggtataattaaagttttcggtccggataaagtatatgttaacgctggtactgtaatgggcggtgttatcatttgggaccttttcagtgagacaaaaattcataacttattgggtcatgaaggttctatcttttatgttaatttaagcaacaacggaagatatgttgccagttgctctgacgacagatctattagattatgggatttagaaactggcaagcagctttctgttggctggagccatacggcaagaatatggaatttaatgttttttgataatgattctaaattgataagtgtttctgaagattgcacatgccgtgtatggaacattatcgaatctagagaaaacgttgccgaattatccatatctaacgtttacgaagtacatttaatcaagagtatatggggcgttgatgtgaaagacgacgaaatgatagctgtaacctccgggaatgatggtaggttaaagttgattgatcttcttcaattgaagagacacggcgatgaagaaacatctttcagtttggatgatatcgcaaagcaatgtggcgatattttcgaaaagaatgaaagtatcaagggatttcaatggttttctttcggtgtaattgctatcacttctttgggtaaaatacttaaatacagtgatgtcacgaaacaatggaagttgttattaacaaatgaaaaattcaacagttatccaattacaaatgggattcaaacgcaaaatatcgctgtcttttccaataataaaagtgacatccttcttatcaaatttagcaaagatagcgctgacataattgagaccgaagaattccatttagatgagctttctaagacaaataactgtctcgttacagaatacgatgatgactccttcttgttgactttacaatccccaaatcctcgtgagaagtttgtatgtttggaaataagccttcagaacttaaaaattaaaagcaagcactgtttcaataagccggaaaatttttcttcctcttgtttgacctccttcagaaatcatattttagtcggctctcgttttagtacattagtaatctacaacttacttgatgagagcgaggagcccttcataattaggagattaagtcccggagacactacaacctctatcgaatttgtagaagataaagacaactctgcggtcttcagtgtaacaaatagggatggctattatgtatttattgagttgacgaaaaacagtttggaagagggtccctacagattaagttataaggtcttgcattctaataagatgatgaaaggtttcttggagggcgctttctttaattctaaaggtgaatacattacttatgggttcaagtccagcttgttttatctctacaatgaaaccaactgttatgaattggctagtgaagtttgtggtggttcccatcgtttatggaatctcgcaaaaattactgatggccacgtattaatgtatattaaggcatccagatttcatttaaggaaaatttacaactccattgtgcctgaaactttagaaaatggtgtacacggaagggaaatcagagatatttccatctgtcctgtttctaataccaacacgaatgacaattttaaggatgggcatatattctgtactgcatctgaagatactacaattaagttgggatattttaacaatagaacagggaaggtgcagaatttttggacacaaagaaagcatgtgtctggattacaacgttgtcagtttataaatcacaaattaatgatatcttcttctgctagagaggagttattcttatgggaattgaacgataagtataataaaaggccatatatgaccataagacaagctttacctgtatccacaaataattctgatttaaggatcatggattttgatgtcaaatttatatctcagtctggtgacttcttattagttactgtttattctgattctacaataaagatttggcactatagggaaaatcagaataagtttgacttgatcatgcaaggtcgttataagacgtgctgtttattcaacgtcgtatttattgcattgaaagaagagctccttgttgtcatttctccaactgatggacatttagtggtttataatataaccgagtacgtaccattttccgttgatccgatttctggcgatttggttgaccacaaattagacgctactatctctaatcttcccgcacctgtagcgcagttgccggtacatcaatctggtgtcaagtccttggactatgttgctaatgctacaagaacttccgccacaattttgacagggggtgatgataatggtttagggttaagcaacttgaaattagatgactctaataaagtaacgttaaaaacaagtgactttatcgctgcagcagcttcttctacaataacgtccggtatgttgattaatggtggcaaagaagtcattaccacatctgttgatcaagtaatacgcgcttgggaaattaccgcaggcaagctttctttagtagataaaaagcgtaccactgtggcggatacaggatctttagaaatcatttccaatgatgaagatgctgattctgagaaaacgttattgatcggaggtgttggtttatccatttggaaaaaatga

SEQ ID NO: 11077 - DNA, 1521 bp, Saccharomyces cerevisiae
atggaatcgacagcaatagtgcctaaaggccctgttgtgggtagtgaagatatggagaaagcggaagtcattgctagtgggtccacagacattatatcaacaacatcaacagcgacaacaacggcggcgattggaagtgtacaggaagaaagtgtaaaacaagaagatgttcctatggaaggtggagagggggaagtcgaggaagaggaaggcgaaactcgctgtatctgtggagagctcgatactccagatgactccggatttttcattcaatgtgagcagtgcagttcctggcagcacggttattgtgtgagtattactcaagacaacgcacctgataaatattggtgcgagcaatgcagaccggagttacatcagctctttaccacagatactggcgaagcaaggtcaatctataaacctgtgcaagagaaaaggaggcaatcaagaaggaaggcacgaagtgcagctgcaagtaaatctcatgccgccaatgaagcagagaaaagtcccagaaataccagcaataccgatgataacgtcgacgatatcggcgacgaagaagatgaagtagaagatgaagcttcggctgtagcattagccaaggacggcaacacgaggtcaagtagaaggaggaggaggaattcaatggatgatgcttctaccgatcagtattcactggatcctggagatagtgataagaagctactggatagaaaaagggcaactttcatggcaagagaagaaaagcaatatcaaagaatgcttgaaaaagccttgaaagaaagcaggaggacatcacatcaagaagatcctgaaagttatgaaaatgatgctgatatataccaaggtgataccgacaatcacaacggcaccactcgattacaaacggatgttatgctaacggaaggcaaaccggactcggtaacaaatgatgatatgaaagaaagcctacgaccatcgaaagagcaatcaatggaaaaaacaaatgatgtggaaaaagaagctagtcaagaaaaggaatcttctacgggttcggcgcaagacactgagaaaactgatgaacccatcctacccctaacctcaatatcttcttctgaggatgattcaaggaaagctagttcgaggggttctaaaagagtttccaaaccagcaagaaagggcaacagaactcgtcgaagcaatacaagttcagacaccaaccaaaatagaaggagtgctgatataggtaccgacaaaccagtaaagcccagattaccccctcaaaggacctcattaaacgaaatgagaagaagggtatccgctattttggagttcatttctagaactcaatgggaattgagtgaagatcagtctgatcgagaggaatttgtacgattcgtggaaaaccagcatttcgtagaaaaagttgatacgatttacaacggttataatgaaagtctatcaatgatggacgacctgactagagagttactactatgggagaaaaaatattcaaataacactaatgccattcaataa

SEQ ID NO: 11078 - DNA, 1521 bp, Artificial Sequence
  Description of Artificial Sequence: Synthetic polynucleotide
atggaatctacagcaatagtgcctaaaggccctgttgtgggtagtgaagatatggagaaagcggaagtcattgctagtgggtccacagacattatatctacaacatctacagcgacaacaacggcggcgattggaagtgtacaggaagaaagtgtaaaacaagaagatgttcctatggaaggtggagagggggaagtcgaggaagaggaaggcgaaactcgctgtatctgtggagagctcgatactccagatgactccggatttttcattcaatgtgagcagtgcagttcctggcagcacggttattgtgtgagtattactcaagacaacgcacctgataaatattggtgcgagcaatgcagaccggagttacatcagctctttaccacagatactggcgaagcaaggtctatctataaacctgtgcaagagaaaaggaggcaatctagaaggaaggcaagaagtgcagctgcaagtaaatctcatgccgccaatgaagcagagaaaagtcccagaaataccagcaataccgatgataacgtcgacgatatcggcgacgaagaagatgaagtagaagatgaagcttctgctgtagcattagccaaggacggcaacacgaggtctagtagaaggaggaggaggaattctatggatgatgcttctaccgatcagtattctttagatcctggagatagtgataagaagttattagatagaaaaagggcaactttcatggcaagagaagaaaagcaatatcaaagaatgcttgaaaaagccttgaaagaaagcaggaggacatctcatcaagaagatcctgaaagttatgaaaatgatgctgatatataccaaggtgataccgacaatcacaacggcaccactagattacaaacggatgttatgcttacggaaggcaaaccggactctgtaacaaatgatgatatgaaagaaagcttaagaccatctaaagagcaatctatggaaaaaacaaatgatgtggaaaaagaagctagtcaagaaaaggaatcttctacgggttctgcgcaagacactgagaaaactgatgaacccatcttgcccttgaccagtatatcttcttctgaggatgatagtaggaaagctagttctaggggttctaaaagagtttccaaaccagcaagaaagggcaacagaactcgtaggagcaatacaagtagtgacaccaaccaaaatagaaggagtgctgatataggtaccgacaaaccagtaaagcccagattaccccctcaaaggaccagtttaaacgaaatgagaagaagggtatccgctattttggagttcatttctagaactcaatgggaattgagtgaagatcagtctgatagagaggaatttgtaagattcgtggaaaaccagcatttcgtagaaaaagttgatacgatttacaacggttataatgaaagtttatctatgatggacgacttgactagagagttattattatgggagaaaaaatattctaataacactaatgccattcaatga

SEQ ID NO: 11079 - DNA, 2400 bp, Saccharomyces cerevisiae
atggttcatcgaggaaggactttgaagtcagacactgatgtaacatctcttaatgcgtcaacagtatcacaccagtcaaagccatttagacagttttcgactaggtcgagagcaaagagtaacgcaagcttcaaaggtttgcgtagagttttaacacatgatggcaccctggataatgattattttaataagcacaacgtttctcagaaatgcaagagttctgatgcacttttcagaaagcgaacgattagtgggttgaatatgacagctttaacaagagtaaagtccaatcaaggaaaaagatcagcatcctttcatagtccggtgcataatacgctgctcagtccaaagaacagcagtcattctaatactggaactgctggtttcggcctgaaaccacgaagaagtaaaagtacccaatctgttctgagtcttcgagatgcgcaagaatctaaaaagagtgaatctactactgacgaggaggtggaatgtttttcggaagacaacattgaagatggaaaggtgaataatgataaagtaatagccgagcatgttatgcctgaagaaaaaaagaatgtgcagcaattaaatcagaatgaattacaatccccggattcaatagatgaacaagaagaagataaatcaggtactgatggaaaggaaaatcatagagctgtatccttaccattacctcatttatcttccaataactatttcggagaatcaagccattctatagaacatcagaaagatggagaaacatctccaagctcaattgaaacaaaactgaatgcaacaagtgtaatcaatgaagaggggcaatcaaaggtgacgaaggaagctgatattgatgacttgtccagccattctcaaaatttgagggcctcattggttaaagcgggcgataatatatcagaagcaccatatgataaagaaaaaaaaattcttgatgttggtaataccttagctgcacataaaagtaatcaaaaaccaagtcattcagatgaacagtttgatcaggaagatcacattgatgcccctaggagtaattcatcaagaaaaagcgactcgagctttatgtctcttaggagacaaagttctaaacaacacaaattattaaacgaagaagaagatctaatcaagcctgatgatatttcttccgctggtaccaaggatattgaagggcatagcttactggaaaattatgcgcctaatatgattctctcccagtcgactggagttgaacgtagatttgaaaattcatcatccatccaaaattcgcttgggaatgaaattcatgactcgggtgagcatatggcttcaggtgatacttttaatgaactggatgatggcaaattgcgcaagagcaagaaaaatggtggaagatctcaacttggccaaaatataccgaactctcagtctactttccccaccattgctaacatcggtagtaaagataataatgtaccacagcacaacttttcgacctccatatcgagtttaaccaataatttgaggagagctgctcctgaaagcttccatggttcaagaatgaataatatttttcacaagaaaggtaatcagaatctacttctgagatccaacgatctcaacaaaaattctgcagccccggcctctccattgtccaacgaacatattacatctagtacgaactccggtagcgatgcaaacagacaatccaactcaggtgccaaatttaatagcttcgcccagttccttaaatcagatgggattgatgcagaatcaagaacacaaagaaaattatggttgcagagggagaattctattatggacttaagttcacaaaatgacggtagtgactctatctttatggcaggaaacattgatgcgaaaagggagtttgagagaatatcccatgaatactctaatgtaaaaagattttacaacccattagatgaagcattgttgagagtacaacctataataacgggaaatgcaaataatatcaggaaaaaaagccataacgatgctcagtcaatcgcacattctagcagtgatacagatcataaggatgaggacgatttgctctttactaactatgacaaaaaatttgatgatctttatccacatcttgcaagtgcaaagattcaggcagtgttgtccggtatatggaaaagcgaaagttacttatttaacaaggatgttaatccaatcaacaagaataggacaacgagtacaaaccacagcgttggccacactgcttcacagaatgcacgtaacttgctgaggggcccgatgggttccagcacgactttgcaccaccaacgcgtcattaactctctgcagccgactacgagggcagtgaatcgcaggatggaaaatgtgggctacatgcatacacagccacaacaaaggtga

SEQ ID NO: 11080 - DNA, 2400 bp, Artificial Sequence
  Description of Artificial Sequence: Synthetic polynucleotide
atggttcatagaggaaggactttgaagagtgacactgatgtaacatctcttaatgcgtctacagtaagccaccagtccaagccatttagacagttttccactaggagcagagcaaagagtaacgcaagcttcaaaggtttgcgtagagttttaacacatgatggcaccttggataatgattattttaataagcacaacgtttctcagaaatgcaagagttctgatgcacttttcagaaagagaacgattagtgggttgaatatgacagctttaacaagagtaaagtccaatcaaggaaaaagaagtgcatcctttcatagtccggtgcataatacgcttctcagtccaaagaacagcagtcattctaatactggaactgctggtttcggcttgaaaccaagaagaagtaaaagtacccaatctgttttgagtcttagagatgcgcaagaatctaaaaagagtgaatctactactgacgaggaggtggaatgtttttctgaagacaacattgaagatggaaaggtgaataatgataaagtaatagccgagcatgttatgcctgaagaaaaaaagaatgtgcagcaattaaatcagaatgaattacaatccccggattctatagatgaacaagaagaagataaatctggtactgatggaaaggaaaatcatagagctgtatccttaccattacctcatttatcttccaataactatttcggagaaagtagccattctatagaacatcagaaagatggagaaacatctccaagctctattgaaacaaaattgaatgcaacaagtgtaatcaatgaagaggggcaatccaaggtgacgaaggaagctgatattgatgacttgtccagccattctcaaaatttgagggcctctttggttaaagcgggcgataatatatctgaagcaccatatgataaagaaaaaaaaattcttgatgttggtaataccttagctgcacataaaagtaatcaaaaaccaagtcattctgatgaacagtttgatcaggaagatcacattgatgcccctaggagtaattcttctagaaaaagcgactccagctttatgtctcttaggagacaaagttctaaacaacacaaattattaaacgaagaagaagatttgatcaagcctgatgatatttcttccgctggtaccaaggatattgaagggcatagcttattggaaaattatgcgcctaatatgattctctcccagtctactggagttgaacgtagatttgaaaattcttcttccatccaaaattctcttgggaatgaaattcatgactctggtgagcatatggcttctggtgatacttttaatgaattagatgatggcaaattgcgcaagagcaagaaaaatggtggaagatctcaacttggccaaaatataccgaactctcagtctactttccccaccattgctaacatcggtagtaaagataataatgtaccacagcacaacttttccacctccatatctagtttaaccaataatttgaggagagctgctcctgaaagcttccatggttccagaatgaataatatttttcacaagaaaggtaatcagaatttacttttgagatccaacgatctcaacaaaaattctgcagccccggcctctccattgtccaacgaacatattacatctagtacgaactccggtagcgatgcaaacagacaatccaacagtggtgccaaatttaatagcttcgcccagttccttaaatctgatgggattgatgcagaatctagaacacaaagaaaattatggttgcagagggagaattctattatggacttaagttctcaaaatgacggtagtgactctatctttatggcaggaaacattgatgcgaaaagggagtttgagagaatatcccatgaatactctaatgtaaaaagattttacaacccattagatgaagcattgttgagagtacaacctataataacgggaaatgcaaataatatcaggaaaaaaagccataacgatgctcagtctatcgcacattctagcagtgatacagatcataaggatgaggacgatttgctctttactaactatgacaaaaaatttgatgatctttatccacatcttgcaagtgcaaagattcaggcagtgttgtccggtatatggaaaagcgaaagttacttatttaacaaggatgttaatccaatcaacaagaataggacaacgagtacaaaccacagcgttggccacactgcttctcagaatgcacgtaacttgttgaggggcccgatgggttccagcacgactttgcaccaccaacgcgtcattaactctttgcagccgactacgagggcagtgaatcgcaggatggaaaatgtgggctacatgcatacacagccacaacaaaggtga

SEQ ID NO: 11081 - DNA, 1650 bp, Saccharomyces cerevisiae
atgagaagaagcccgtccagatcaaataataactttgcagtaccgaattgctcaactaattcaaactctagtcagcaacaattaactacaccttcagatgatctcaacagtaacgaacctaatgacccagatgatagtaggtctctacctactatcaagaaattcaataataaacattctataaacaattacaacactttagcatcggccgggaaaaacaacaacaataaacgagctagcaatgataatttgctcattcctggtgagaatgcccataaacagaaaatatacactaaggatgaaaacttgaagagcttgtacctagatatcgatgtttctgtcgctaaagccctatcctcatcagcaactgctccgaagctgatcaataccgcaagaacttcctctactaccactgccactacctcaaataatatcctgacatcaccctcttatcgtgaatcaaattattcttctccatcctcatattctttttcctcctactactcatccgctacgtctgcttcctcatcaacctcatcatttttaaaatcttcagggttatcgtccagagttaagtctccttcatcttcggttaaggcaggttcttttggtgcgccttcgtccccaacatctgggatacctaatcctaaaagtagcaagaagcctatatttttgagacggtattctcatgatacctcttcaaatgaaggtcttgatatcgatgttgcgatcgaaaaattactacaagtgggtgagtcaagagaaattacaaaaacgtccaaaaaaaagaactttccattccattcttgggaaattcaactcatttgctatcatgcaagagaaatttttttgaatcaacctactcttttgagattacaagcgcctatcaaagttgtcggtgatgttcatggacaatttaatgatttattgagaattttgaagttgtctggtgtgccatctgatactaattatctgttcttgggtgattatgtggaccgtggtaagaactcattggaaacaatactattgttattatgttacaaaataaagtacaaagacaacttttttatgttaaggggtaatcacgaatctgctaatgtcacaaagatgtacggtttctatgatgaatgcaaaaggcgattgagctcgaaagtatggaaaatgttcgttgacgtatttaatactttgccattagcagcaattattcaagataagatcttttgcgttcatggaggtatatcgcccgatttacatgacatgaagcaaatcgaaaaagtcgcaagaccaacggatattcctgaaagcgggctggttacagacttactgtggagtgacccagaccctcaagtaactgattggtcagaaaatgatcgtggtgtttcatacacattttctaagaggaacgttcttgatttttgtgctaagtttaaattcgatttaatacttaggggacatatggtcgtagaagatggttatgaattctttgccaggaaaaagtttgtcacaatcttttcagcaccaaattattgtggagaatttcataattggggggcagtaatgagcgttacaacgggtatgatgtgtagctttgaactgttaaagccgcgtgcattgaaaaataaaaagaagttatacaaaaccaaagtgtag

SEQ ID NO: 11082 - DNA, 1650 bp, Artificial Sequence
  Description of Artificial Sequence: Synthetic polynucleotide
atgagaagaagcccgtccagatctaataataactttgcagtaccgaattgctctactaatagcaactctagtcagcaacaattaactacaccttctgatgatctcaacagtaacgaacctaatgacccagatgatagtaggtctttgcctactatcaagaaattcaataataaacattctataaacaattacaacactttagcatctgccgggaaaaacaacaacaataaaagagctagcaatgataatttgctcattcctggtgagaatgcccataaacagaaaatatacactaaggatgaaaacttgaagagcttgtacttggatatcgatgtttctgtcgctaaagccctttcctcttctgcaactgctccgaagttaatcaataccgcaagaacttcctctactaccactgccactacctctaataatatcttaacatctccctcttatcgtgaaagtaattattcttctccatccagctattctttttcctcctactactcttccgctacgtctgcttcctcttccacctcttcttttttaaaatcttctgggttatcttccagagttaagtctccttcttcttctgttaaggcaggttcttttggtgcgccttcttccccaacatctgggatacctaatcctaaaagtagcaagaagcctatatttttgagaagatattctcatgatacctcttccaatgaaggtcttgatatcgatgttgcgatcgaaaaattattacaagtgggtgagagcagagaaattacaaaaacgtccaaaaaaaagaactttccattccattcttgggaaattcaactcatttgctatcatgcaagagaaatttttttgaatcaacctactcttttgagattacaagcgcctatcaaagttgtcggtgatgttcatggacaatttaatgatttattgagaattttgaagttgtctggtgtgccatctgatactaattatcttttcttgggtgattatgtggaccgtggtaagaactctttggaaacaatattattgttattatgttacaaaataaagtacaaagacaacttttttatgttaaggggtaatcacgaatctgctaatgtcacaaagatgtacggtttctatgatgaatgcaaaaggagattgagcagtaaagtatggaaaatgttcgttgacgtatttaatactttgccattagcagcaattattcaagataagatcttttgcgttcatggaggtatatctcccgatttacatgacatgaagcaaatcgaaaaagtcgcaagaccaacggatattcctgaaagcgggttggttacagacttattatggagtgacccagaccctcaagtaactgattggtctgaaaatgatcgtggtgtttcttacacattttctaagaggaacgttcttgatttttgtgctaagtttaaattcgatttaatacttaggggacatatggtcgtagaagatggttatgaattctttgccaggaaaaagtttgtcacaatcttttctgcaccaaattattgtggagaatttcataattggggggcagtaatgagcgttacaacgggtatgatgtgtagctttgaattattaaagccgcgtgcattgaaaaataaaaagaagttatacaaaaccaaagtgtga

SEQ ID NO: 11083 - DNA, 627 bp, Saccharomyces cerevisiae
atgtccctggaagaatttgacgaagttaaatatgatcattcaactaaacgcctagatacaccatcaaggtacctgctgcgcaaggctagaagaaaccctaacgggctacaagaactgcgtgagtcgatgaagtcatccacaatttatgtaggaaatctttccttttatacatcagaagaacaaatttacgaattattcagtaaatgtggcacaataaaaagaataattatgggtttggaccgttttaagttcacgccatgtggcttctgttttattatatatagttgtccagatgaagcattgaatgccttaaaatatttgtccgatacaaagttagacgaaaagacaattaccattgatctagatcctggttttgaagatggaagacagtttggtcgtggtaagagcggtggtcaagtcagcgatgaattgaggttcgattttgatgcatccagaggtggcttcgccattccatttgcagagcgtgtcggcgtaccacattccagatttgataacagtagctcacaatctaatacgaataattatatccctcctcctgatgcaatgggtactttcagaccaggtttcgatgaagaaagagaagatgataactacgtacctcagtag

SEQ ID NO: 11084 - DNA, 627 bp, Artificial Sequence
  Description of Artificial Sequence: Synthetic polynucleotide
atgtccttagaagaatttgacgaagttaaatatgatcattctactaaacgcttagatacaccatctaggtacttgttacgcaaggctagaagaaaccctaacgggttgcaagaattgcgtgagtccatgaagtcttccacaatttatgtaggaaatctttccttttatacaagtgaagaacaaatttacgaattattcagtaaatgtggcacaataaaaagaataattatgggtttggaccgttttaagttcacgccatgtggcttctgttttattatatatagttgtccagatgaagcattgaatgccttaaaatatttgtccgatacaaagttagacgaaaagacaattaccattgatttggatcctggttttgaagatggaagacagtttggtcgtggtaagagcggtggtcaagtcagcgatgaattgaggttcgattttgatgcatccagaggtggcttcgccattccatttgcagagcgtgtcggcgtaccacattccagatttgataacagtagctctcaatctaatacgaataattatatccctcctcctgatgcaatgggtactttcagaccaggtttcgatgaagaaagagaagatgataactacgtacctcagtga

SEQ ID NO: 11085 - DNA, 921 bp, Saccharomyces cerevisiae
atgaattataactgcgaaatacaaaacaggaacagtaagaatgttgacaatcaagtcagtctaccccctatccaagttctatttaactccatagaaaaacggagtatgcccgagttggcattttcgaacatagaatactcgcatgggaaccttcggtctagtaccgaggaacaaaactatcctgcgcctgtgttacttccacagcatcattcgattgcgtatcccgcaattaattctggcggtactagtactactgctactcctactgcttctacagttgaaacgtccaagacgagtagcagtgctatggatacacaatctcaatatggcagttcaaagaagtcaaaatcggcgtccgatgatgcaaagccctgctacaaatccgccccaatatatgaaataatcaataaggaaaaggatgcgggggcacaatacaacaggccattttcggattttgtagaatctaaatcaaggaggaagcaaaattcgggcaggaggtctaacctgccaaaggaaacagtgcagatactgaatacttggttgctgaaccacctgaataacccctacccaactcaacaagaaaagagggagttgttaatcaaaactgggctaaccaagattcaactttctaattggttcataaatgtgagaagacgcaaaatatttagtgattactataccctggtaaactcaattcctaatgacaacgcgaataataccccagtggaacgagttcaaaacgtctcagcatatcataacacattatctgccacaaataatactatgtacgatgctacgtcaacctgctccacggattatgaattatccaagagatttgctcatgcccccgttacacgccgtaaaaaactaattgataggctggaagaattgaaaaagctatccaaccctgatatgaattga

SEQ ID NO: 11086 - DNA, 921 bp, Artificial Sequence
  Description of Artificial Sequence: Synthetic polynucleotide
atgaattataactgcgaaatacaaaacaggaacagtaagaatgttgacaatcaagtcagtttaccccctatccaagttttatttaactccatagaaaaaagaagtatgcccgagttggcattttccaacatagaatactctcatgggaaccttagatctagtaccgaggaacaaaactatcctgcgcctgtgttacttccacagcatcattctattgcgtatcccgcaattaattctggcggtactagtactactgctactcctactgcttctacagttgaaacgtccaagacgagtagcagtgctatggatacacaatctcaatatggcagttccaagaagagtaaatctgcgtccgatgatgcaaagccctgctacaaatccgccccaatatatgaaataatcaataaggaaaaggatgcgggggcacaatacaacaggccattttctgattttgtagaatctaaatctaggaggaagcaaaatagtggcaggaggtctaacttaccaaaggaaacagtgcagatattgaatacttggttgttgaaccacttgaataacccctacccaactcaacaagaaaagagggagttgttaatcaaaactgggttaaccaagattcaactttctaattggttcataaatgtgagaagacgcaaaatatttagtgattactataccttggtaaactctattcctaatgacaacgcgaataataccccagtggaaagagttcaaaacgtctctgcatatcataacacattatctgccacaaataatactatgtacgatgctacgtccacctgctccacggattatgaattatccaagagatttgctcatgcccccgttacacgccgtaaaaaattgattgataggttagaagaattgaaaaagttatccaaccctgatatgaattga

SEQ ID NO: 11087 - DNA, 2352 bp, Saccharomyces cerevisiae
atggtgaatactaggggctacactactcttccgaatgttgaagaaccagcaaataactcacaagatgagctaaactcgcaggactttgagcaagctataggaatgccatcagaacccccggtatatgtggaagagatggggatggaagaaccgcaggctccggaagcctttagtgagaaagtccagcgatttcgtatgtgttttgaaaataacgtggtgattccagtaaagaaaaatgtagtggatccgctagcacaaatgatttccctggcctctgagaaattcgatttgttcttaagtaaaataggtaatgttatggtaatgaggagaatattttacatcatgatgatgtctatcattgcagcgttgattattgcgagtgataggttaccgaatggaaaagctcgaggttcaaatggatcattctcggaccatgatctccttttacagtatgctcggaaatcgatagacctttcaaagatagaaagagatttagagtatattagtagtatgccccacatgtcaggaacaagtggtgatgccgctattagacattatattaaagagtcgttcgacaaaaatggtataaggctagctggggaagaggagttcatggcgtattcgaattacccaggaaatgtctcacttcgtgtatattcaaaggatgatacagaagggtttgatattcccttaaatgaggagaactttaacccaatgagccataatggtcaattgaacaacataccggtgatttatgctaataaagcatcgttggacgatatggcttctatgcaagatcaagggcttttaaacggtgactttattttactagtgcattacggagattatgttttccaacaaatgttgactgctcaagaatatggtgcgaaagcaattatctttatttctgagccttatcaagacaacaaagacgtgatacaaatgaagtcagttgcgttgccgcagtatggtactggtgatgcacttacgcctgaatgggaaggatcaataagagatcctatcgatgctacggaagccaagtgcctacccaaaattccatccataccgatatctgccaatcaaggagataaaatactagctatattatcagacactggcgtaaagttttctaataatttattcagtgggtcgcttaacgattgtcgacttgacctactagtgcaaacagcaattagggaacgccacccggttcacgatatagttggtaaaattgaaggatcggaacaagcgggcagggcaattgttattgctgcaccgaggaactctgctagttatggcactatgtatccttcttttggaaccgtcgttttgctgtctctgatccaattatatcaagaaatggtttacaaatttgactggaagcctctaagaaatatatatttcatttcctttgggggctctgaatttaatgaagcgggagccacggagctgatggaaaagagaacagaggcattgaagagtgaaatatacaccattatcgacgtcggccaaatcggtatatgggatgatagtaacaatttagagatacaatgtcatccgctactagtagatctttttcaaaaaaacatgacaagccgtaaatttaacgttaaagtggataatgttcaccagttcggcgactggacgccgtatctagcgcaagggattccagttgcgatcatttcatctccaggagtcatgaatagagaacatccgatctacacagtagaagacaaattcgatttcatcaaagataaactaagagacaaaaagaagggagaggtactttctgagataatgctatatcttgtcgaaaaatcactcgagctcattgacgatccattcatcccattcagcatatcgaactacgtagatttcctttcaactacgttaaaagacctccaaaaagaatgtcctgatacggtaaactttgacgaagtctttttgggcacaacattgtgggaaaacactaaactgcagttcgaaaaatggaaaagcgaatggacagagcttatgtatggagccggtacatatatagaacccactatcattgccattaatcgttggtcatggaactacctactttccctaataggcgttacccaatgtttggaggaagggttaatggatagaaccttttacaagaacgttatcttcgggccaaaactctgggtcgacaaaggtgacccacttcgttcatggacgttccctgaaatcagggacactattgcaatcaaggactggagctctgtgcaggttcaagctaacacactcggcacaattttacaaaatacagcacgctattttcttgagaataaaaaccttcatggaataaacacgaacgaattttag

SEQ ID NO: 11088 - DNA, 2352 bp, Artificial Sequence
  Description of Artificial Sequence: Synthetic polynucleotide
atggtgaatactaggggctacactactcttccgaatgttgaagaaccagcaaataactctcaagatgagttgaactctcaggactttgagcaagctataggaatgccatctgaacccccggtatatgtggaagagatggggatggaagaaccgcaggctccggaagcctttagtgagaaagtccagagatttcgtatgtgttttgaaaataacgtggtgattccagtaaagaaaaatgtagtggatccgttggcacaaatgatttccttggcctctgagaaattcgatttgttcttaagtaaaataggtaatgttatggtaatgaggagaatattttacatcatgatgatgtctatcattgcagcgttgattattgcgagtgataggttaccgaatggaaaagctagaggtagtaatggaagtttcagtgaccatgatctccttttacagtatgctagaaaatctatagacctttccaagatagaaagagatttagagtatattagtagtatgccccacatgtctggaacaagtggtgatgccgctattagacattatattaaagagagtttcgacaaaaatggtataaggttggctggggaagaggagttcatggcgtattctaattacccaggaaatgtctcccttcgtgtatattccaaggatgatacagaagggtttgatattcccttaaatgaggagaactttaacccaatgagccataatggtcaattgaacaacataccggtgatttatgctaataaagcaagtttggacgatatggcttctatgcaagatcaagggcttttaaacggtgactttattttattggtgcattacggagattatgttttccaacaaatgttgactgctcaagaatatggtgcgaaagcaattatctttatttctgagccttatcaagacaacaaagacgtgatacaaatgaagtctgttgcgttgccgcagtatggtactggtgatgcacttacgcctgaatgggaaggatccataagagatcctatcgatgctacggaagccaagtgcttgcccaaaattccatccataccgatatctgccaatcaaggagataaaatattggctatattaagtgacactggcgtaaagttttctaataatttattcagtgggtctcttaacgattgtaggcttgacttattggtgcaaacagcaattagggaacgccacccggttcacgatatagttggtaaaattgaaggatctgaacaagcgggcagggcaattgttattgctgcaccgaggaactctgctagttatggcactatgtatccttcttttggaaccgtcgttttgttatctttgatccaattatatcaagaaatggtttacaaatttgactggaagcctttgagaaatatatatttcatttcctttgggggctctgaatttaatgaagcgggagccacggagttgatggaaaagagaacagaggcattgaagagtgaaatatacaccattatcgacgtcggccaaatcggtatatgggatgatagtaacaatttagagatacaatgtcatccgttgttagtagatctttttcaaaaaaacatgacaagccgtaaatttaacgttaaagtggataatgttcaccagttcggcgactggacgccgtatttggcgcaagggattccagttgcgatcatttcttctccaggagtcatgaatagagaacatccgatctacacagtagaagacaaattcgatttcatcaaagataaattgagagacaaaaagaagggagaggtactttctgagataatgctttatcttgtcgaaaaatctctcgagctcattgacgatccattcatcccattcagcataagcaactacgtagatttcctttctactacgttaaaagacctccaaaaagaatgtcctgatacggtaaactttgacgaagtctttttgggcacaacattgtgggaaaacactaaattacagttcgaaaaatggaaaagcgaatggacagagcttatgtatggagccggtacatatatagaacccactatcattgccattaatcgttggtcctggaactacttactttccttgataggcgttacccaatgtttggaggaagggttaatggatagaaccttttacaagaacgttatcttcgggccaaaactctgggtcgacaaaggtgacccacttcgttcttggacgttccctgaaatcagggacactattgcaatcaaggactggagctctgtgcaggttcaagctaacacactcggcacaattttacaaaatacagcacgctattttcttgagaataaaaaccttcatggaataaacacgaacgaattttga

SEQ ID NO: 11089 - DNA, 1359 bp, Saccharomyces cerevisiae
atgggcttcaatatagcgatgctgtgcgactttttttatccacagttaggtggagtcgaattccatatatatcatttatcgcagaaactaatcgatttgggccattctgtcgtcattataactcacgcttacaaagatcgagtcggcgtacgacatcttaccaacggtctaaaggtctatcacgtaccattttttgtgattttcagagaaaccactttccccactgttttttcaacatttccaataataaggaatattcttctcagagagcagatccaaattgttcattctcatggtagcgcttccacgttcgctcacgagggaattcttcatgctaatactatgggattgagaactgtgttcacggaccattcactctacggttttaataacttaacgtcgatttgggtgaataagttgctaacatttaccttgacaaacatagatcgggttatatgtgtttctaatacatgcaaagaaaatatgattgttagaacagaattaagtcctgatataatctcagtaattcccaacgcagtggtgagcgaagatttcaaaccaagggatcctactggtggcaccaagagaaaacaaagtagggataagatagtgatcgtggtcatcggaaggctctttccaaacaaagggtccgatttacttactcgcataattccgaaagtttgttcctcacatgaagatgtcgaatttatagtagcgggcgatggtccaaagttcatagattttcaacaaatgattgaaagtcatagactacaaaaacgtgtgcaactcttaggctctgttccacatgagaaagtcagggatgtattatgtcaaggtgacatatatttacacgctagtttaacagaagcatttggtacaattctagttgaggccgcatcttgtaatttgctaattgtaacgacacaagtcggaggaattcccgaagtgttaccaaatgagatgactgtttatgcagaacagacatccgtttctgaccttgttcaagcaacaaataaagctatcaatatcataagaagtaaagctttggacacttcctcttttcatgatagcgtgtctaaaatgtacgactggatggacgtagccaaaaggacagtagagatatatactaatatatcttctacttcttccgctgatgataaagattggatgaaaatggtagcaaatctttacaaaagagatggaatctgggctaaacatctttatctgttatgtggaattgtagagtacatgctttttttcctcttagagtggctataccccagggatgaaatcgatctagctccaaaatggcccaagaaaacagtgtctaacgagacgaaggaagcaagagaaacttaa

SEQ ID NO: 11090 - DNA, 1359 bp, Artificial Sequence
  Description of Artificial Sequence: Synthetic polynucleotide
atgggcttcaatatagcgatgttgtgcgactttttttatccacagttaggtggagtcgaattccatatatatcatttatctcagaaattaatcgatttgggccattctgtcgtcattataactcacgcttacaaagatagggtcggcgtaagacatcttaccaacggtttgaaggtctatcacgtaccattttttgtgattttcagagaaaccactttccccactgttttttctacatttccaataataaggaatattcttctcagagagcagatccaaattgttcattctcatggtagcgcttccacgttcgctcacgagggaattcttcatgctaatactatgggattgagaactgtgttcacggaccattctctctacggttttaataacttaacgtccatttgggtgaataagttgttgacatttaccttgacaaacatagatagagttatatgtgtttctaatacatgcaaagaaaatatgattgttagaacagaattaagtcctgatataatctctgtaattcccaacgcagtggtgagcgaagatttcaaaccaagggatcctactggtggcaccaagagaaaacaaagtagggataagatagtgatcgtggtcatcggaaggctctttccaaacaaagggtccgatttacttactcgcataattccgaaagtttgttcctctcatgaagatgtcgaatttatagtagcgggcgatggtccaaagttcatagattttcaacaaatgattgaaagtcatagattacaaaaacgtgtgcaactcttaggctctgttccacatgagaaagtcagggatgtattatgtcaaggtgacatatatttacacgctagtttaacagaagcatttggtacaattttggttgaggccgcatcttgtaatttgttaattgtaacgacacaagtcggaggaattcccgaagtgttaccaaatgagatgactgtttatgcagaacagacatccgtttctgaccttgttcaagcaacaaataaagctatcaatatcataagaagtaaagctttggacacttcctcttttcatgatagcgtgtctaaaatgtacgactggatggacgtagccaaaaggacagtagagatatatactaatatatcttctacttcttccgctgatgataaagattggatgaaaatggtagcaaatctttacaaaagagatggaatctgggctaaacatctttatcttttatgtggaattgtagagtacatgctttttttcctcttagagtggttataccccagggatgaaatcgatttggctccaaaatggcccaagaaaacagtgtctaacgagacgaaggaagcaagagaaacttga

SEQ ID NO: 11091 - DNA, 2607 bp, Saccharomyces cerevisiae
atgcgcaatgcaggtgttcaagttgacacaaatatgcagaagataagcttacaggacacagttctagtcaacgagatgaaggggcgggtgaaattcattggggaaactcaatttgcaaaaggcatatggtacggcattgaactagataaaccgttaggaaagaatgatggaagcgctaacggtattcgttactttgatatcgacctgaagaaagctaattcaaatggtggttattatggtcttttctgcaagaaagatacgttgcagttttataaaccagatgacgatgagcatagtttgctaaatggtaatgcagcgcaagaaacaattaagaatctacaagtaaaatgtgaatcattggcgtccaaattaaataaaattaaaatagaaaatcatgagctgaaaacttccgttgaaaagctgagtactaatgaaactgttctattgtctaaaatctcaagattggataaactagtcaaagaactgaaagtggaaaatggtaatatgaaaactcatttggataatttcaatcacctattagatgcttcagatagtgtaatggcaccggatctcgacaaaggcacactgttagaaaggagccatcttcttcagggactactcgaccaaacaaagttgtcatatgataaagctatgaaggtgcaagaggacctgctcgaggagaatactcagttattagaagaaaatgcagtattatctaaaaaaatatcggatttaggtctgcaattgcaacagactaataatacaatcggcgaccttgccttgcagattgaagctcaaagtaaatcatctaatattgttgataaattgactaatgataatatcctactcacaagtaatataaaggctttaaacaatgagttggaggaactacaggcaaaagaaaaattggatgaaaatttaagaattacctatgagcaactcgagcaagaactgagactgcaattaagtaatttgcaatctgcattggaaaatgaaaaggagatagcaggcacatatatcgaagaaaattcaagattaaaagcaacattggaatctattgaagccaaaacatctcacaaatttcaaagtcttgaactaaaagtgaacactttacaggaggaattatatcaaaataaattgctaaagaaattttaccaaatatatgagccatttgcacaaccacatttggcggctctttcctctcaattgcaatatttagccgaagtaatcgaaagtgaaaattttggaaagttggagaatattgaaatccatataattctaaaagtgttgagctctatcagttatgcgcttcatatttacaccataaagaatactcccgatcacctggaaacgacattacaatgtttcaaagtaaatattgctccgatttcgatgtggctaagcgagtttttgcaaaggaagttttcttctaaacaggaaaccgccttttccatttgtcagtttttagaagataataagtttctagataaggatgtgaccttgatactaaaaatacttcatccgatattggaaacaactgttccgaagctgttggcttttcttagaacgaacagcaatttcaatgacaatgataccctatgtcttattggttccctttacgagagatcactttcacttattgccagaatagataaacttatcggaaaggaagaaatttcgaaacaagacaataggttatttttatatccttcctgtgatataaccctgtcctctatcttaacgatacttttttcagatgcactgtttttgcgacaagattacaaacgtatttcttctttgaaaaaactagaggtattttttcaaggaatagaaagtctcttagaaaacataactatatttcctgagcaacccagtcaacaaacaagtgattcagaaagtcaatgtaatattaaggagggcaatttttcaaactcgttattaagcgatcgcttgaatgaagagaacattcgactcaaagaagtactggtccaaaaggaaaatatgctaactgaattggaaacaaaaattaaaattattattgggagggatttagagaggaaaacccttgaagagaatatcaaaacactcaaagtagagttaaataacaaaaatgaggaaaattgtggcaaaacagaaattcttaacaagctgaaagaagaaaatttcaacctagtaaaccgtttgaagaatatggagctcaaactatatcaaataaaggataataatacgttgaacaaaatttatttagacagagagaaagtagatagagtaaatttagtttcggaaatcatggaattgagagaaaccataagacgacaaataaaagagcagaaacgagtgagcatcgatttcagctggttagacgagcttccagctgtggaaaataagcaaccattcaaagaacatatcaaccacagtttggacaccttggggatagaaatgttcaacttcgtgagtacctcacggattttagatttaaagcttgatcaacctttggcagaagatgaactctggcatgaaagagatcattcttacatttcgtatttaaagcgcaagaggaaaaatatacgactcaaatctcaaaatgttgttacatattacaaatga

SEQ ID NO: 11092 - DNA, 2607 bp, Artificial Sequence
  Description of Artificial Sequence: Synthetic polynucleotide
atgcgcaatgcaggtgttcaagttgacacaaatatgcagaagataagcttacaggacacagttttggtcaacgagatgaaggggagagtgaaattcattggggaaactcaatttgcaaaaggcatatggtacggcattgaattagataaaccgttaggaaagaatgatggaagcgctaacggtattcgttactttgatatcgacttgaagaaagctaatagtaatggtggttattatggtcttttctgcaagaaagatacgttgcagttttataaaccagatgacgatgagcatagtttgttgaatggtaatgcagcgcaagaaacaattaagaatttacaagtaaaatgtgaatctttggcgtccaaattaaataaaattaaaatagaaaatcatgagttgaaaacttccgttgaaaagttgagtactaatgaaactgttttattgtctaaaatctccagattggataaattggtcaaagaattgaaagtggaaaatggtaatatgaaaactcatttggataatttcaatcacttattagatgcttctgatagtgtaatggcaccggatctcgacaaaggcacattattagaaaggagccatcttcttcagggattactcgaccaaacaaagttgagttatgataaagctatgaaggtgcaagaggacttactcgaggagaatactcagttattagaagaaaatgcagtattatctaaaaaaatatctgatttaggtttacaattgcaacagactaataatacaatcggcgaccttgccttgcagattgaagctcaaagtaaatcttctaatattgttgataaattgactaatgataatatcttactcacaagtaatataaaggctttaaacaatgagttggaggaattacaggcaaaagaaaaattggatgaaaatttaagaattacctatgagcaactcgagcaagaattgagattacaattaagtaatttgcaatctgcattggaaaatgaaaaggagatagcaggcacatatatcgaagaaaattctagattaaaagcaacattggaatctattgaagccaaaacatctcacaaatttcaaagtcttgaattgaaagtgaacactttacaggaggaattatatcaaaataaattgttgaagaaattttaccaaatatatgagccatttgcacaaccacatttggcggctctttcctctcaattgcaatatttagccgaagtaatcgaaagtgaaaattttggaaagttggagaatattgaaatccatataattttgaaagtgttgagctctatcagttatgcgcttcatatttacaccataaagaatactcccgatcacttggaaacgacattacaatgtttcaaagtaaatattgctccgatttccatgtggttaagcgagtttttgcaaaggaagttttcttctaaacaggaaaccgccttttccatttgtcagtttttagaagataataagtttttggataaggatgtgaccttgatattgaaaatacttcatccgatattggaaacaactgttccgaagttgttggcttttcttagaacgaacagcaatttcaatgacaatgataccttatgtcttattggttccctttacgagagatctctttctcttattgccagaatagataaacttatcggaaaggaagaaatttccaaacaagacaataggttatttttatatccttcctgtgatataaccttatcctctatcttaacgatacttttttctgatgcattatttttgagacaagattacaaacgtatttcttctttgaaaaaattagaggtattttttcaaggaatagaaagtctcttagaaaacataactatatttcctgagcaacccagtcaacaaacaagtgattctgaaagtcaatgtaatattaaggagggcaatttttccaactctttattaagcgatcgcttgaatgaagagaacattagactcaaagaagtattagtccaaaaggaaaatatgttgactgaattggaaacaaaaattaaaattattattgggagggatttagagaggaaaacccttgaagagaatatcaaaacactcaaagtagagttaaataacaaaaatgaggaaaattgtggcaaaacagaaattcttaacaagttgaaagaagaaaatttcaacttggtaaaccgtttgaagaatatggagctcaaactttatcaaataaaggataataatacgttgaacaaaatttatttagacagagagaaagtagatagagtaaatttagtttctgaaatcatggaattgagagaaaccataagaagacaaataaaagagcagaaaagagtgagcatcgatttcagctggttagacgagcttccagctgtggaaaataagcaaccattcaaagaacatatcaaccacagtttggacaccttggggatagaaatgttcaacttcgtgagtaccagtagaattttagatttaaagcttgatcaacctttggcagaagatgaactctggcatgaaagagatcattcttacatttcttatttaaagcgcaagaggaaaaatataagactcaaatctcaaaatgttgttacatattacaaatga

SEQ ID NO: 11093 - DNA, 894 bp, Saccharomyces cerevisiae
atgtctggaagctatcaacatttatcaaacgttggatcgcgtgttatgaaaagattggggaatcgacccaaaaactttcttcctcatagtgaaaagttcattaaaaaatctacgcctgagttcatgaagtcagatttaaaggaagtagatgagaaaactagtttcaagagtgaaaaagaatggaagtttatacctggcgacagagtagtagtaatgagcggggcttccaaaggaaatatagctgtaattaaatctttcgataaaagaacaaattcattcatattagatgagaatgggcccacaaagactgttccagttcctaaacaattctggcttgaaggccaaacatctcacatgataacaattccagtttcaattttgggaaaggatttaaggctagttgctgatattgacgatgaaaagaccccaggaaagacaagaacggtggcagtaagggatgtttccttcaatggttcctactatgatgcagactacaaaaaggtaatgccatatagatgcgtaaagggtcaaccagacttgatcattccatggcctaaaccagacccaattgatgtgcaaacgaacttggctaccgatcctgtaattgctagagaacaaacattttgggtcgattccgtagtgagaaaccctattccaaaaaaggcaataccaagtattcgcaatcctcattctaagtacaaaaggggtaccttgacagcgaaagatatagctaagctagtagcacctgagatgcccctaacagaggtaagaaaaagccatttggcagaaaaaaaggagttggctgagagagaagtaccaaaactaactgaagaggacatggaagctattggggcgagggtttttgaatttttggaaaaacaaaaaagagaataa

SEQ ID NO: 11094 - DNA, 894 bp, Artificial Sequence
  Description of Artificial Sequence: Synthetic polynucleotide
atgtctggaagctatcaacatttatctaacgttggatcccgtgttatgaaaagattggggaataggcccaaaaactttcttcctcatagtgaaaagttcattaaaaaatctacgcctgagttcatgaagagtgatttaaaggaagtagatgagaaaactagtttcaagagtgaaaaagaatggaagtttatacctggcgacagagtagtagtaatgagcggggcttccaaaggaaatatagctgtaattaaatctttcgataaaagaacaaattctttcatattagatgagaatgggcccacaaagactgttccagttcctaaacaattctggcttgaaggccaaacatctcacatgataacaattccagtttctattttgggaaaggatttaaggttggttgctgatattgacgatgaaaagaccccaggaaagacaagaacggtggcagtaagggatgtttccttcaatggttcctactatgatgcagactacaaaaaggtaatgccatatagatgcgtaaagggtcaaccagacttgatcattccatggcctaaaccagacccaattgatgtgcaaacgaacttggctaccgatcctgtaattgctagagaacaaacattttgggtcgattccgtagtgagaaaccctattccaaaaaaggcaataccaagtattcgcaatcctcattctaagtacaaaaggggtaccttgacagcgaaagatatagctaagttggtagcacctgagatgcccttgacagaggtaagaaaaagccatttggcagaaaaaaaggagttggctgagagagaagtaccaaaattaactgaagaggacatggaagctattggggcgagggtttttgaatttttggaaaaacaaaaaagagaatga

SEQ ID NO: 11095 - DNA, 1389 bp, Saccharomyces cerevisiae
atgagttactttcctcgaacatatgctcacttgatgagaaatgttcttgctcataataaagggaatatatacttacaaattggtacacagctgcacgatactcaaataaaaattcgatttaatggagttcgttatattagtcggaatcatggcgggaaacagcaacatataaacactgcgccgatagaatttactcccaattttggatatggtgatagaacctctaattgcaataaaaaggttgaatcgactgccatgaaaacgctaagatgcacagatgatatatcaacttcaagtggaagcgaagctactaccgatgcaagcacacaacttccatttaatgtcaaacttgtagacccgatggtaagaaaatctaagagaccatctcacgcaatcagcgaagggctgaatatgaaaactttaaagaagaaggtaattatgccatatcttcagttgaccaagccccgactcaccattctagtgatgttaagtgccatttgttcgtatgctttatctccatatccagcctccgtcaatgaattgttatgtttaacagtaggcactactttgtgttccggttctgcaaacgctataaatatgggcagagagccagaatttgatagacaaatggtgagaactcaggcgaggcccgttgttagaggtgatgttacacctacccaggcattcgagtttgccgcacttatcggaacattaggagtatctatcttgtactttggtgttaatcctaccgttgctattcttggtgcttcaaatatcgcgttatatggctgggcctatacgtctatgaaaagaaagcatatcattaacacatggttaggtgccctagtaggaatggtacctcctctaatgggatgggcagccgcaagtccgctttcacatccgggatcttggtgccttgctggtctattgtttgcttggcaattcccacactttaatacgttgagtcataacattagaaatgaatacaaaaatgccggatacgttatgactgcatggaaaaatccgctcctaaacgcccgtgtgtcgttgagatactctatcctaatgttccctttatgtttcggattgtcttattttaatatcacagattggtactaccaaatagattccggacttataaatgcctggctaacgttctgggctttcaaattctattggcaacaaagaatcaactattctgcaaaaacattaaaagataacgtcaagtttaataaaggtctaagtgtagccaacatttatgcaaggaaaacttttatggctagtgtattgcacctaccggcaattctaatcctagccattatacataaaaaaggccgctgggattggatatatcctggtgaagcaaagcgaccacaggaacgattttag

SEQ ID NO: 11096 - DNA, 1389 bp, Artificial Sequence
  Description of Artificial Sequence: Synthetic polynucleotide
atgagttactttcctagaacatatgctcacttgatgagaaatgttcttgctcataataaagggaatatatacttacaaattggtacacagttgcacgatactcaaataaaaattagatttaatggagttcgttatattagtagaaatcatggcgggaaacagcaacatataaacactgcgccgatagaatttactcccaattttggatatggtgatagaacctctaattgcaataaaaaggttgaatctactgccatgaaaacgttgagatgcacagatgatatatctacttctagtggaagcgaagctactaccgatgcaagcacacaacttccatttaatgtcaaacttgtagacccgatggtaagaaaatctaagagaccatctcacgcaatcagcgaagggttaaatatgaaaactttaaagaagaaggtaattatgccatatcttcagttgaccaagcccaggctcaccattttggtgatgttaagtgccatttgttcttatgctttatctccatatccagcctccgtcaatgaattgttatgtttaacagtaggcactactttgtgttccggttctgcaaacgctataaatatgggcagagagccagaatttgatagacaaatggtgagaactcaggcgaggcccgttgttagaggtgatgttacacctacccaggcattcgagtttgccgcacttatcggaacattaggagtatctatcttgtactttggtgttaatcctaccgttgctattcttggtgcttctaatatcgcgttatatggctgggcctatacgtctatgaaaagaaagcatatcattaacacatggttaggtgccttggtaggaatggtacctcctttgatgggatgggcagccgcaagtccgctttctcatccgggatcttggtgccttgctggtttattgtttgcttggcaattcccacactttaatacgttgagtcataacattagaaatgaatacaaaaatgccggatacgttatgactgcatggaaaaatccgctcttgaacgcccgtgtgtctttgagatactctatcttgatgttccctttatgtttcggattgtcttattttaatatcacagattggtactaccaaatagattccggacttataaatgcctggttgacgttctgggctttcaaattctattggcaacaaagaatcaactattctgcaaaaacattaaaagataacgtcaagtttaataaaggtttgagtgtagccaacatttatgcaaggaaaacttttatggctagtgtattgcacttaccggcaattttgatcttggccattatacataaaaaaggccgctgggattggatatatcctggtgaagcaaagagaccacaggaaagattttga

SEQ ID NO: 11097 - DNA, 1203 bp, Saccharomyces cerevisiae
atgccatttgtaaaaggttttgagccgatctccctaagagacacaaacctttttgaaccaattaagattggtaacactcagcttgcacatcgtgcggttatgcccccattgaccagaatgagggccactcaccccggaaatattccaaataaggagtgggctgctgtgtattatggtcagcgtgctcaaagacctggtaccatgatcatcacggaaggtacgtttatttcccctcaagccggcggctatgacaacgcccctgggatttggtctgatgagcaggtcgctgagtggaagaatatctttttagccatccatgattgtcagtcgttcgcgtgggtacaactttggtctttaggctgggcatccttcccagacgtattggcaagagacgggttacgctatgactgtgcatctgacagagtgtatatgaatgctacgttacaagaaaaggccaaagatgcgaataatctcgaacatagtttgactaaagacgacattaaacagtatatcaaggattacatccatgcggctaagaattctatcgcggctggcgccgatggtgtagaaattcatagcgccaatgggtacttgttgaatcagttcttggatccacattctaataagaggaccgacgaatacggcggaacgatcgaaaacagggcccgctttacactggaggttgtcgatgctcttatcgaaactatcggtcctgaacgggtgggtttgaggttgtcgccgtacggcacttttaacagtatgtctgggggtgctgaaccaggtattatcgctcaatattcgtatgttttgggtgaattagagaagagggcaaaggctggtaagcgtttggcctttgtgcacctcgttgaaccacgtgtcacggacccatcgttggtggagggcgaaggagaatattccgagggtactaacgattttgcctactctatatggaagggtccaatcatcagagctggtaattacgctcttcatccagaagtggttagagaacaagtaaaggatcccagaaccttgataggctatggtagattcttcatctctaacccagatttagtctaccgtttagaagagggcctgccattgaacaagtatgacagaagtaccttctacaccatgtccgcggaaggttataccgactacccaacatatgaagaggcagtagatttaggttggaacaagaactga

SEQ ID NO: 11098 - DNA, 1203 bp, Artificial Sequence
  Description of Artificial Sequence: Synthetic polynucleotide
atgccatttgtaaaaggttttgagccgatctccttgagagacacaaacctttttgaaccaattaagattggtaacactcagcttgcacatcgtgcggttatgcccccattgaccagaatgagggccactcaccccggaaatattccaaataaggagtgggctgctgtgtattatggtcagcgtgctcaaagacctggtaccatgatcatcacggaaggtacgtttatttcccctcaagccggcggctatgacaacgcccctgggatttggtctgatgagcaggtcgctgagtggaagaatatctttttagccatccatgattgtcagtctttcgcgtgggtacaactttggtctttaggctgggcatccttcccagacgtattggcaagagacgggttacgctatgactgtgcatctgacagagtgtatatgaatgctacgttacaagaaaaggccaaagatgcgaataatctcgaacatagtttgactaaagacgacattaaacagtatatcaaggattacatccatgcggctaagaattctatcgcggctggcgccgatggtgtagaaattcatagcgccaatgggtacttgttgaatcagttcttggatccacattctaataagaggaccgacgaatacggcggaacgatcgaaaacagggcccgctttacattagaggttgtcgatgctcttatcgaaactatcggtcctgaaagagtgggtttgaggttgtctccgtacggcacttttaacagtatgtctgggggtgctgaaccaggtattatcgctcaatattcttatgttttgggtgaattagagaagagggcaaaggctggtaagcgtttggcctttgtgcacctcgttgaaccacgtgtcacggacccatctttggtggagggcgaaggagaatattccgagggtactaacgattttgcctactctatatggaagggtccaatcatcagagctggtaattacgctcttcatccagaagtggttagagaacaagtaaaggatcccagaaccttgataggctatggtagattcttcatctctaacccagatttagtctaccgtttagaagagggcttaccattgaacaagtatgacagaagtaccttctacaccatgtccgcggaaggttataccgactacccaacatatgaagaggcagtagatttaggttggaacaagaactga

SEQ ID NO: 11099 - DNA, 459 bp, Saccharomyces cerevisiae
atgtccttcattaaaaacttgttatttggaggtgttaaaacaagtgaggatccaaccgggctcacaggtaacggggcctcaaacacaaacgattctaataaaggtagtgaaccggtagtagcgggtaatttctttcctaggacgctttccaaatttaacggccacgacgatgaaaaaatatttattgctattaggggcaaagtatacgactgcacaagagggaggcagttttacggtccaagcgggccatacactaactttgcaggccatgatgcgtcgcgtggtcttgcattgaactccttcgatctggacgttattaaagattgggatcagcctatcgatcccttagatgatctgacaaaagaacagattgacgcactggatgagtggcaagagcattttgagaataagtacccatgcattggtactctgattccggagcctggcgtgaacgtatga

SEQ ID NO: 11100 - DNA, 459 bp, Artificial Sequence
  Description of Artificial Sequence: Synthetic polynucleotide
atgtccttcattaaaaacttgttatttggaggtgttaaaacaagtgaggatccaaccgggctcacaggtaacggggcctccaacacaaacgattctaataaaggtagtgaaccggtagtagcgggtaatttctttcctaggacgctttccaaatttaacggccacgacgatgaaaaaatatttattgctattaggggcaaagtatacgactgcacaagagggaggcagttttacggtccaagcgggccatacactaactttgcaggccatgatgcgtcccgtggtcttgcattgaactccttcgatttggacgttattaaagattgggatcagcctatcgatcccttagatgatttaacaaaagaacagattgacgcattggatgagtggcaagagcattttgagaataagtacccatgcattggtactttgattccggagcctggcgtgaacgtatga

SEQ ID NO: 11101 - DNA, 1800 bp, Saccharomyces cerevisiae
atgagcggatttcacaatgttggaaatatcaatatgatggctcaacagcagatgcaacaaaatagaataaagattagcgtgaggaactggcagaatgcaaccatgaacgatttgattaattttataagccgcaacgctcgagtagctgtttatgacgctcatgtggaaggacctttagttattggatatgtcaactcaaaggcagaagcagaatcgttaatgaaatggaacggtgtccggtttgcaggcagtaatttaaagttcgaacttttagataacaatggggcctctgcgggaacttcagacaccatttcgttcttgaggggggtgctccttaagaggtatgacccacaaacaaaattactaaatttgggcgctttacattcagatcccgagctaattcaaaagggcgtctttagttccatctccacccagtctaagatgtttccagcaatgatgaaactggcttctacagaaaaaagtttgatagtggaaagtgtcaatcttgctgacaaccaacttaaggacatctcagcaatttccacattggctcaaacatttcctaatttgaaaaacctctgtctggccaacaatcagatttttagatttagatcgctagaagtttggaagaacaaattcaaagatctaagagagcttttgatgacaaataacccgataaccaccgataagttgtatcgcactgaaatgttaagattatttccgaaattggttgtactagataacgtgattgtgagagacgaacaaaaattgcaaaccgtttactcattaccgatgaagattcaacagttttttttcgaaaacgatgcattagggcaatcatctacagactttgcaactaactttttgaatctatgggataataatagagaacaactgttaaatttgtattcgccccaatcccagttttctgtttccgtggattctactattcctccatctacggtaacagattcggaccaaactccagcatttggttattacatgtcgtcctcacgtaatatatccaaagtgtccagtgaaaaatctatccagcagagattgtcaatcgggcaagagtccattaatagtatattcaagactttgccgaaaacaaagcaccatttacaagaacaacccaatgaatactcaatggaaacaattagttatcctcaaataaatgggttcgttattacgttgcacggattttttgaagagactggcaagcctgaactggaatccaataaaaaaacggggaaaaataactatcaaaagaatagaagatacaatcatggttacaactccacatcaaataataagttatccaaaaaatcctttgatagaacctgggtaattgttccaatgaataatagtgtcataatcgcatctgatctgttaactgtaagagcgtattccacaggcgcttggaaaactgcatctattgcaatagcacagcctccacagcaacaggcctcggtcctaccacaggtcgcaagcatgaacccaaatataacgacaccaccgcagccacaaccttcagtggtaccaggagggatgagcattcccggcgcaccccaaggagccatggtcatggctcccactttgcaactacctccagatgtccagtcgcggctaaatcccgtacaactcgagctgctgaataaactacatttggaaacgaaattgaatgcagaatacacgtttatgttggccgagcaaagtaactggaactatgaagttgccataaagggttttcagagtagcatgaatggcatccctagagaagcatttgtgcagttctaa

SEQ ID NO: 11102 - DNA, 1800 bp, Artificial Sequence
  Description of Artificial Sequence: Synthetic polynucleotide
atgagcggatttcacaatgttggaaatatcaatatgatggctcaacagcagatgcaacaaaatagaataaagattagcgtgaggaactggcagaatgcaaccatgaacgatttgattaattttataagccgcaacgctcgtgtagctgtttatgacgctcatgtggaaggacctttagttattggatatgtcaactccaaggcagaagcagaatctttaatgaaatggaacggtgtcagatttgcaggcagtaatttaaagttcgaacttttagataacaatggggcctctgcgggaacttctgacaccatttctttcttgaggggggtgctccttaagaggtatgacccacaaacaaaattattgaatttgggcgctttacattctgatcccgagttgattcaaaagggcgtctttagttccatctccacccagtctaagatgtttccagcaatgatgaaattggcttctacagaaaaaagtttgatagtggaaagtgtcaatcttgctgacaaccaacttaaggacatctctgcaatttccacattggctcaaacatttcctaatttgaaaaacctctgtttggccaacaatcagatttttagatttagatccttagaagtttggaagaacaaattcaaagatttgagagagcttttgatgacaaataacccgataaccaccgataagttgtatcgcactgaaatgttaagattatttccgaaattggttgtattggataacgtgattgtgagagacgaacaaaaattgcaaaccgtttactctttaccgatgaagattcaacagttttttttcgaaaacgatgcattagggcaatcttctacagactttgcaactaactttttgaatttatgggataataatagagaacaattattaaatttgtattctccccaatcccagttttctgtttccgtggattctactattcctccatctacggtaacagattctgaccaaactccagcatttggttattacatgtcttcctctcgtaatatatccaaagtgtccagtgaaaaatctatccagcagagattgtccatcgggcaagagtccattaatagtatattcaagactttgccgaaaacaaagcaccatttacaagaacaacccaatgaatactccatggaaacaattagttatcctcaaataaatgggttcgttattacgttgcacggattttttgaagagactggcaagcctgaattggaatccaataaaaaaacggggaaaaataactatcaaaagaatagaagatacaatcatggttacaactccacaagtaataataagttatccaaaaaatcctttgatagaacctgggtaattgttccaatgaataatagtgtcataatcgcatctgatttattaactgtaagagcgtattccacaggcgcttggaaaactgcatctattgcaatagcacagcctccacagcaacaggcctctgtcttgccacaggtcgcaagcatgaacccaaatataacgacaccaccgcagccacaaccttctgtggtaccaggagggatgagcattcccggcgcaccccaaggagccatggtcatggctcccactttgcaattacctccagatgtccagtctagattgaatcccgtacaactcgagttattgaataaattgcatttggaaacgaaattgaatgcagaatacacgtttatgttggccgagcaaagtaactggaactatgaagttgccataaagggttttcagagtagcatgaatggcatccctagagaagcatttgtgcagttctga

SEQ ID NO: 11103 - DNA, 1293 bp, Saccharomyces cerevisiae
atgacagttttatacacatctgcatcgctgaaaaaaatgaagtgcttggcattcaacatgggcatgaattgcgtacgaacagtatctcatgcaagaagtggaggtgcaaaatttggaggacggaatgtatttaatatatttgactcaaaaactcctgattcagtgcgtataaaggccttcaaaaacacaatataccagtctgccatgggcaaaggtaagaccaagttttctgcaatggaaattaatctcataacaagtctagtgcgcggatataaaggagaaggtaagaagaacgcgataaatcctctccaaactaacgtgcaaattcttaacaaattattactaacacatcgattaacagacaaagacatattagaaggaatgaacctggcagccggtcctgtcaatgttgctattcctcgagacataacaccgcaggaagaaaagaagaaagttgaactaagaaatcgaaaagcagagaatatggatcttcacccgagcaggaagatgcatattaaggaacttctacactctttgaacttagatatgtgtaatgatgaggaggtttatcagaaaatatcactttacttacagaaaaatgaggaaagcaggacttcagtgggtgcctcgcaacaaaaccacgtagatatcgatataaactccctaaaacgctatctacaaaatattgaaaagaaggcacgtcaaaaaagtgccatcgataaacaaaaaaagaatcaagctcgtatatatcaatggaatactcaatccttctccgaaatagtacccttatcagctggaaatatcttattcaaaagggaacccaatcgcttatggaaacgtttacaaaatggaataagtgtatttttaggttcaaacggaggaggaaaaaagagtaaaactactaaaaaagtacttcaagggaataacatattgttacactcattagaaaacaataaggatatgaccctgtcaaacaactttgatcacagtgtctttaacatcaattttacggacttatttggcgttattaatgcatctgggtccccaccagatagagttttgaacgaaattaatgagatcgaattaaaaggttggaaatgtgtggggaacttatacgataataataaaattgtagtttttcaaagtagcaatccactcttagaggatacgaagattcctcaaaagtctttcactaattcaaagagattccttatttcactctcagcattgctggcctccttttttgcatattatagataccgtctatctcaacgtcaagaatcaaagaaatga

SEQ ID NO: 11104 - DNA, 1293 bp, Artificial Sequence
  Description of Artificial Sequence: Synthetic polynucleotide
atgacagttttatacacatctgcatctttgaaaaaaatgaagtgcttggcattcaacatgggcatgaattgcgtaagaacagtatctcatgcaagaagtggaggtgcaaaatttggaggaagaaatgtatttaatatatttgactctaaaactcctgattctgtgcgtataaaggccttcaaaaacacaatataccagtctgccatgggcaaaggtaagaccaagttttctgcaatggaaattaatctcataacaagtttagtgcgcggatataaaggagaaggtaagaagaacgcgataaatcctctccaaactaacgtgcaaattcttaacaaattattattaacacatagattaacagacaaagacatattagaaggaatgaacttggcagccggtcctgtcaatgttgctattcctagagacataacaccgcaggaagaaaagaagaaagttgaattgagaaatagaaaagcagagaatatggatcttcacccgagcaggaagatgcatattaaggaacttttacactctttgaacttagatatgtgtaatgatgaggaggtttatcagaaaatatctctttacttacagaaaaatgaggaaagcaggacttctgtgggtgcctctcaacaaaaccacgtagatatcgatataaactccttgaaacgctatttacaaaatattgaaaagaaggcacgtcaaaaaagtgccatcgataaacaaaaaaagaatcaagctcgtatatatcaatggaatactcaatccttctccgaaatagtacccttatctgctggaaatatcttattcaaaagggaacccaatcgcttatggaaacgtttacaaaatggaataagtgtatttttaggttccaacggaggaggaaaaaagagtaaaactactaaaaaagtacttcaagggaataacatattgttacactctttagaaaacaataaggatatgaccttatctaacaactttgatcacagtgtctttaacatcaattttacggacttatttggcgttattaatgcatctgggtccccaccagatagagttttgaacgaaattaatgagatcgaattaaaaggttggaaatgtgtggggaacttatacgataataataaaattgtagtttttcaaagtagcaatccactcttagaggatacgaagattcctcaaaagtctttcactaattctaagagattccttatttctctctctgcattgttagcctccttttttgcatattatagataccgtttatctcaacgtcaagaatccaagaaatga

SEQ ID NO: 11105 - DNA, 4515 bp, Saccharomyces cerevisiae
atgtcgagggagtcgaacgacacaatacagagcgatacggttagatcatcctctaaatcagactattttagaatccagctaaataatcaagactactatatgtcaaaacccacctttttggacccatcgcacggtgaaagcctgcccttaaaccagttttcacaggtcccaaacatcagggtgtttggtgctttacccacagggcatcaagtattgtgccacgtccatggcattctaccttacatgttcatcaagtatgatggacaaataactgacacgagtacattgagacaccaaagatgtgcccaagttcataaaacgctggaagtaaaaattagggcatcctttaaaaggaaaaaagatgataaacacgatttagccggcgacaaacttggaaatctcaattttgtcgctgatgtctctgttgtaaagggtataccattttatggttaccacgttggctggaatctgttttacaaaatttctttgcttaatccttcttgtctaagtaggatttcggaattgattagagatggcaagattttcggaaagaaattcgaaatttatgaatcacatattccttacttgctacaatggaccgcagattttaacttatttggatgttcatggataaacgtggataggtgttattttcgctctcctgttttaaatagtatactggacatagataagctgacaattaatgatgatcttcagttgttactagatcgattttgtgacttcaagtgtaacgtactcagtagaagggattttccacgggttggaaatggattgattgagatagatatactaccgcaattcatcaaaaatagagaaaagttacagcatagagatatacatcacgactttttggaaaaactgggagatatttctgacatacctgtcaaaccatatgtatcctctgctagggacatgataaatgaacttaccatgcaacgagaggagttgtccttgaaggaatataaagaaccaccagaaacaaagcgccatgtgagtggtcatcaatggcaatcttctggagagttcgaagcgttttataagaaagcacaacataaaacaagtacttttgatggtcaaataccaaattttgagaactttatagataagaatcaaaaattctcagccataaatacgccctatgaagcattaccgcaattgtggccaaggcttccacagattgaaataaacaataatagtatgcaagataaaaagaacgacgaccaagttaatgcatcgttcaccgaatacgagatatgtggtgttgataatgagaacgaaggtgtaaaaggaagcaatataaagtctcggtcttattcatggttaccggaaagcattgcgtctccgaaagattctactatactattagatcatcaaacaaaatatcacaatacgataaatttttcaatggattgtgctatgacgcaaaatatggcaagtaaacgaaaacttagatcatctgtttctgctaataaaacatcgttgctgtctcggaaaagaaagaaggttatggctgcgggattacgctatggaaaaagagcctttgtttatggtgagcctcctttcggttatcaagatattctgaataaattggaagacgagggattcccaaaaatagactataaggaccctttcttttcgaatccagttgatctagaaaataaaccttacgcgtacgcaggtaagaggtttgaaataagctcgacacatgtatcaacgagaatacccgtccaatttgggggagagaccgtatcagtttataacaagccaactttcgacatgttttcctcctggaaatatgcgttaaaaccacctacgtatgatgctgttcaaaaatggtacaataaagtaccctcgatgggaaacaaaaaaactgagtctcagataagcatgcacacccctcatagtaagtttttatacaaatttgctagtgacgtttctggaaaacaaaaaagaaaaaaaagtagcgttcacgattctcttactcatctgacacttgagattcatgcaaacacgagaagtgataaaattccagaccctgcaatagatgaagtttccatgattatatggtgtcttgaagaagaaactttccctttagatttggatatcgcttacgaagggattatgatagtccacaaagcttctgaggatagtacatttcctactaaaattcaacattgtattaacgaaattcccgtgatgttctatgaaagtgaatttgaaatgtttgaggctctaactgatttggtattacttcttgatcctgatattctttccggtttcgaaatacataatttttcgtggggttatataattgaaaggtgtcaaaaaatacatcaatttgacattgtcagggaacttgccagagtcaaatgccaaattaagacgaagttgtcagatacttggggatatgcccattcctcaggaattatgattaccggaagacatatgattaatatatggagagcgttgaggtccgacgtaaatttaacgcaatatactattgaaagtgctgcgttcaatatcctccataaacgattacctcacttttcatttgagtcattaactaatatgtggaacgctaaaaagagcacaaccgaattaaagactgtgttaaattattggttatcaagagctcagataaatatacaactattaagaaagcaggattacattgctcgaaatatcgaacaggcaagattgataggaatagatttccattctgtatattacagaggatcacaatttaaagttgagtcttttttaatccgaatatgcaagtccgaaagttttatccttctttctccaggcaaaaaggatgttcgtaagcaaaaagcacttgaatgtgtgcctttggttatggagccagaatctgctttctacaaaagtcctttaattgtgctggatttccaatcattgtatccatccattatgattggatacaactattgctattcgactatgataggaagagtgcgagaaataaacttaacggaaaataaccttggagtatctaagttttcattaccaagaaacattttagctttattaaaaaatgatgtaactatcgctccaaatggtgttgtttatgccaagacctctgttagaaaatcaacgttatccaaaatgttaacagatatccttgatgtcagagtgatgataaagaaaacaatgaacgaaataggtgatgacaacactaccctaaaaaggcttttgaataacaaacagttagcactaaaattattggcgaatgtcacctacggttatacatcagcttcattttctggacgaatgccatgctctgatttagctgatagcattgtacaaacaggcagagaaacattggagaaagcaatagatattattgagaaagatgaaacttggaacgccaaagttgtctatggagacacagatagtttatttgtatatctacctggaaaaactgctattgaggctttttctataggacatgctatggcagaaagagttactcaaaacaatccaaaaccaatctttttgaagtttgaaaaagtataccatccctccatattaattagcaaaaaaaggtacgtaggattttcctatgaaagtccttcgcagacccttcctatttttgatgctaagggtattgaaactgttagaagggatggtatcccagcccagcagaagattattgaaaaatgtattcgattactttttcaaaccaaagacctgtcaaaaataaaaaagtatcttcaaaatgaattttttaagattcaaataggaaaggtatctgcccaagatttttgttttgcaaaagaagttaaattaggagcgtataaaagcgaaaagacagcccctgcaggtgccgtggttgtaaaaagaagaataaatgaagaccatagagcagaaccccaatacaaggagcgtataccttaccttgttgttaaaggaaagcaaggacaactgcttcgggaaagatgcgtatcaccagaagagttcttagaaggtgagaatttagagttagattcggagtattatataaacaaaattctgatacctcctcttgatagattgttcaatttgattggtataaatgttggcaactgggctcaggaaatagtaaaatccaaaagggcgagcacaactactacaaaagtggaaaacataacaagagtaggaacttctgcaacatgttgtaattgtggtgaagaattgactaaaatatgttcacttcagttatgtgatgactgtttagagaaaagaagcaccacaaccttatcatttctcataaagaaattaaagagacaaaaagaataccaaacactaaagaccgtgtgcaggacgtgcagttatcgttacacttccgatgcaggcatcgaaaatgaccatatagctagtaaatgcaattcatatgactgtccagtattttactctcgtgtcaaagcagaaagatacttgagagataatcaatctgttcaaagggaagaagcattaatatctctaaatgattggtaa

SEQ ID NO: 11106 - DNA, 4515 bp, Artificial Sequence
  Description of Artificial Sequence: Synthetic polynucleotide
atgtctagggagagcaacgacacaatacagagcgatacggttagaagttcctctaaaagtgactattttagaatccagttgaataatcaagactactatatgtccaaacccacctttttggacccatctcacggtgaaagcttgcccttaaaccagttttcccaggtcccaaacatcagggtgtttggtgctttacccacagggcatcaagtattgtgccacgtccatggcattttaccttacatgttcatcaagtatgatggacaaataactgacacgagtacattgagacaccaaagatgtgcccaagttcataaaacgttagaagtaaaaattagggcatcctttaaaaggaaaaaagatgataaacacgatttagccggcgacaaacttggaaatctcaattttgtcgctgatgtctctgttgtaaagggtataccattttatggttaccacgttggctggaatttattttacaaaatttctttgcttaatccttcttgtttaagtaggatttctgaattgattagagatggcaagattttcggaaagaaattcgaaatttatgaaagtcatattccttacttgttgcaatggaccgcagattttaacttatttggatgttcttggataaacgtggataggtgttattttcgctctcctgttttaaatagtatattggacatagataagttaacaattaatgatgatcttcagttgttattagatagattttgtgacttcaagtgtaacgtactcagtagaagggattttccaagagttggaaatggattgattgagatagatatattaccgcaattcatcaaaaatagagaaaagttacagcatagagatatacatcacgactttttggaaaaattaggagatatttctgacatacctgtcaaaccatatgtatcctctgctagggacatgataaatgaacttaccatgcaaagagaggagttgtccttgaaggaatataaagaaccaccagaaacaaagcgccatgtgagtggtcatcaatggcaatcttctggagagttcgaagcgttttataagaaagcacaacataaaacaagtacttttgatggtcaaataccaaattttgagaactttatagataagaatcaaaaattctctgccataaatacgccctatgaagcattaccgcaattgtggccaaggcttccacagattgaaataaacaataatagtatgcaagataaaaagaacgacgaccaagttaatgcatctttcaccgaatacgagatatgtggtgttgataatgagaacgaaggtgtaaaaggaagcaatataaagtctcgttcttattcttggttaccggaaagcattgcgtctccgaaagattctactatattattagatcatcaaacaaaatatcacaatacgataaatttttccatggattgtgctatgacgcaaaatatggcaagtaaaagaaaacttagatcttctgtttctgctaataaaacatctttgttatctagaaaaagaaagaaggttatggctgcgggattacgctatggaaaaagagcctttgtttatggtgagcctcctttcggttatcaagatattttgaataaattggaagacgagggattcccaaaaatagactataaggaccctttcttttctaatccagttgatttggaaaataaaccttacgcgtacgcaggtaagaggtttgaaataagctctacacatgtatctacgagaatacccgtccaatttgggggagagaccgtatctgtttataacaagccaactttcgacatgttttcctcctggaaatatgcgttaaaaccacctacgtatgatgctgttcaaaaatggtacaataaagtaccctctatgggaaacaaaaaaactgagtctcagataagcatgcacacccctcatagtaagtttttatacaaatttgctagtgacgtttctggaaaacaaaaaagaaaaaaaagtagcgttcacgattctcttactcatttaacacttgagattcatgcaaacacgagaagtgataaaattccagaccctgcaatagatgaagtttccatgattatatggtgtcttgaagaagaaactttccctttagatttggatatcgcttacgaagggattatgatagtccacaaagcttctgaggatagtacatttcctactaaaattcaacattgtattaacgaaattcccgtgatgttctatgaaagtgaatttgaaatgtttgaggctttgactgatttggtattacttcttgatcctgatattctttccggtttcgaaatacataatttttcttggggttatataattgaaaggtgtcaaaaaatacatcaatttgacattgtcagggaacttgccagagtcaaatgccaaattaagacgaagttgagtgatacttggggatatgcccattccagtggaattatgattaccggaagacatatgattaatatatggagagcgttgaggtccgacgtaaatttaacgcaatatactattgaaagtgctgcgttcaatatcctccataaaagattacctcacttttcttttgagtctttaactaatatgtggaacgctaaaaagagcacaaccgaattaaagactgtgttaaattattggttatctagagctcagataaatatacaattattaagaaagcaggattacattgctagaaatatcgaacaggcaagattgataggaatagatttccattctgtatattacagaggatctcaatttaaagttgagtcttttttaatcagaatatgcaagtccgaaagttttatccttctttctccaggcaaaaaggatgttcgtaagcaaaaagcacttgaatgtgtgcctttggttatggagccagaatctgctttctacaaaagtcctttaattgtgttggatttccaatctttgtatccatccattatgattggatacaactattgctattctactatgataggaagagtgagagaaataaacttaacggaaaataaccttggagtatctaagttttctttaccaagaaacattttagctttattaaaaaatgatgtaactatcgctccaaatggtgttgtttatgccaagacctctgttagaaaatctacgttatccaaaatgttaacagatatccttgatgtcagagtgatgataaagaaaacaatgaacgaaataggtgatgacaacactaccttgaaaaggcttttgaataacaaacagttagcattgaaattattggcgaatgtcacctacggttatacatctgcttctttttctggaagaatgccatgctctgatttagctgatagcattgtacaaacaggcagagaaacattggagaaagcaatagatattattgagaaagatgaaacttggaacgccaaagttgtctatggagacacagatagtttatttgtatatttacctggaaaaactgctattgaggctttttctataggacatgctatggcagaaagagttactcaaaacaatccaaaaccaatctttttgaagtttgaaaaagtataccatccctccatattaattagcaaaaaaaggtacgtaggattttcctatgaaagtccttctcagacccttcctatttttgatgctaagggtattgaaactgttagaagggatggtatcccagcccagcagaagattattgaaaaatgtattagattactttttcaaaccaaagacttatccaaaataaaaaagtatcttcaaaatgaattttttaagattcaaataggaaaggtatctgcccaagatttttgttttgcaaaagaagttaaattaggagcgtataaaagcgaaaagacagcccctgcaggtgccgtggttgtaaaaagaagaataaatgaagaccatagagcagaaccccaatacaaggagcgtataccttaccttgttgttaaaggaaagcaaggacaattacttagagaaagatgcgtatctccagaagagttcttagaaggtgagaatttagagttagattctgagtattatataaacaaaattttaatacctcctcttgatagattgttcaatttgattggtataaatgttggcaactgggctcaggaaatagtaaaatccaaaagggcgagcacaactactacaaaagtggaaaacataacaagagtaggaacttctgcaacatgttgtaattgtggtgaagaattgactaaaatatgttctcttcagttatgtgatgactgtttagagaaaagaagcaccacaaccttatcttttctcataaagaaattaaagagacaaaaagaataccaaacattgaagaccgtgtgcaggacgtgcagttatcgttacacttccgatgcaggcatcgaaaatgaccatatagctagtaaatgcaattcttatgactgtccagtattttactctcgtgtcaaagcagaaagatacttgagagataatcaatctgttcaaagggaagaagcattaatatctttgaatgattggtga

SEQ ID NO: 11107 - DNA, 642 bp, Saccharomyces cerevisiae
atgattatgaatagtacaaacacagttgtatatatcaaagttaagggtaggagaccacagggattcttggatcctcccaaatttgagtggaatggaacaaaggagcgacagctttggacaatggtatcaaatttgaattattcacaagatcaaatagattggcagaatttatcaaaaatatttgaaacgcctgaattttttcttaaaaagagaacatataaattatttgctgaacacttagagcttttacaactacaattggagaaaaaaagagatcttgagaagtattcaaatgatcaagtgaatgaagggatgtctgatttaatacataaatatacccctactttacaaaatgataatctattaaatgtatccgcaagcccactgaccacggaaagacaggattctgaagaagttgagacagaagtaacaaatgaggcgttacaacatttgcaaacttccaaaattttgaacattcacaagaaaacatcggatagtgagaataagcctaatgacaaattggataaggatggtattaataaagaaatggagtgcggtagttcagatgacgatttatcttcgagcttaagtgttagtaaatctgcgttggaagaagcgctaatggacagattgcaattctga

SEQ ID NO: 11108 - DNA, 642 bp, Artificial Sequence
  Description of Artificial Sequence: Synthetic polynucleotide
atgattatgaatagtacaaacacagttgtatatatcaaagttaagggtaggagaccacagggattcttggatcctcccaaatttgagtggaatggaacaaaggagagacagctttggacaatggtatctaatttgaattattctcaagatcaaatagattggcagaatttatccaaaatatttgaaacgcctgaattttttcttaaaaagagaacatataaattatttgctgaacacttagagcttttacaattacaattggagaaaaaaagagatcttgagaagtattctaatgatcaagtgaatgaagggatgtctgatttaatacataaatatacccctactttacaaaatgataatttattaaatgtatccgcaagcccattgaccacggaaagacaggattctgaagaagttgagacagaagtaacaaatgaggcgttacaacatttgcaaacttccaaaattttgaacattcacaagaaaacatctgatagtgagaataagcctaatgacaaattggataaggatggtattaataaagaaatggagtgcggtagttctgatgacgatttatcttctagcttaagtgttagtaaatctgcgttggaagaagcgttaatggacagattgcaattctga

SEQ ID NO: 11109 - DNA, 1122 bp, Saccharomyces cerevisiae
atgactattgatggagacgtacatgaaatttccccatttttccaggttaggcaaactaaatggggcggtagggcttgtttcagtaatggtaatattcctaaagggacaacagtcttgcaagtcagtaattttacaggaacatctatttcctatgagttcaggaaggaagtttgtcacaattgtttcgcatacgctaatgcgaaaactatgaagtacaaactaaactacgattacctgagagatttggtttgtaatgcacactaccaaattaaccctaagaagtttctgggcgctggactgtggttctgttcagaacattgcagaacttcttatcttcaaataccaaatatcattgaattaattgaatgttatgagatattactgcatcattttccaagcatgctgaaaagatataattatacctctgaacaggaggaaaaattaaactctatcttaatttcggaaaatgtcatacagtcttcatgggatgagattgaaagtaaatggataccgcgcatcaacaacatgaaatctgcgaagagaataaatcaattaccacccacttgcgaagatgaatattgctgcattaggtttgtgtgcgagagtttgtttaatcttaaatatatggatcctcagtgcataacataccgagctttcaatatgttacaatcgaatgagcttagcaaaatatctaaatttcctgtcttactgcactttcaaaaattagtatttcaaacactctatattctattaccttcacatttgcatagaatgctctccataccgctattgagacatatattaggtactgaatatgggaatgcttttggtttatggcaagagggcgaagcctcagacagcagagaatattttggatactgggtatttccagaagcctcctatttcaaccactcttgtaaccccaatataacgaaatatcgtaaaggtaattcaatgctattcactatgaatagagatataaaaaaggatgagcagatctgtatcgattattccggggtactggacttaccaacagtaaaacgccgggcctttttggccgacagttggttttttgattgtgcttgtgaaagatgtaaatcagaattgcaatctgtccattag

SEQ ID NO: 11110 - DNA, 1122 bp, Artificial Sequence
  Description of Artificial Sequence: Synthetic polynucleotide
atgactattgatggagacgtacatgaaatttccccatttttccaggttaggcaaactaaatggggcggtagggcttgtttcagtaatggtaatattcctaaagggacaacagtcttgcaagtcagtaattttacaggaacatctatttcctatgagttcaggaaggaagtttgtcacaattgtttcgcatacgctaatgcgaaaactatgaagtacaaattgaactacgattacttgagagatttggtttgtaatgcacactaccaaattaaccctaagaagtttttgggcgctggattatggttctgttctgaacattgcagaacttcttatcttcaaataccaaatatcattgaattaattgaatgttatgagatattattacatcattttccaagcatgttgaaaagatataattatacctctgaacaggaggaaaaattaaactctatcttaatttctgaaaatgtcatacagtcttcttgggatgagattgaaagtaaatggataccgcgcatcaacaacatgaaatctgcgaagagaataaatcaattaccacccacttgcgaagatgaatattgctgcattaggtttgtgtgcgagagtttgtttaatcttaaatatatggatcctcagtgcataacatacagagctttcaatatgttacaaagcaatgagcttagcaaaatatctaaatttcctgtcttattacactttcaaaaattagtatttcaaacactctatattttattaccttctcatttgcatagaatgctctccataccgttattgagacatatattaggtactgaatatgggaatgcttttggtttatggcaagagggcgaagccagtgacagcagagaatattttggatactgggtatttccagaagcctcctatttcaaccactcttgtaaccccaatataacgaaatatcgtaaaggtaattctatgcttttcactatgaatagagatataaaaaaggatgagcagatctgtatcgattattccggggtattggacttaccaacagtaaaacgccgtgcctttttggccgacagttggttttttgattgtgcttgtgaaagatgtaaaagtgaattgcaatctgtccattga

SEQ ID NO: 11111 - DNA, 2148 bp, Saccharomyces cerevisiae
atgagccagcatattaggaaattagattctgatgtttctgaaagacttaaatctcaggcatgcacggtatcgctagcatcagcggttagagaaatagttcaaaattctgtagatgcacacgctaccactatcgacgtcatgatcgacctccctaatttgagctttgcagtttacgatgatggtattggtttgactcgaagtgacctaaatatattggccacacaaaattatacttccaaaatacgaaagatgaatgatttagtaacgatgaaaacctacggttacagaggagacgccctatatagcatttctaatgtctctaatctgtttgtttgttccaagaaaaaggattacaactctgcatggatgagaaaatttccatccaaaagcgtcatgttgagtgagaataccatactcccaatagatcctttttggaaaatttgtccttggagccgaacaaagtctggtactgttgttattgttgaagatatgctgtataatttacctgtccggcgcagaatactaaaggaagaaccccctttcaagacttttaacacaataaaggcagatatgctacagatactggtaatgcacccgatgatttcactcaacgtacaatatacagacaaactcagaatcaatacagaagttcttttccgctcaaagaacataactgaggggttaacaaagcaccagcaaatgtctcaagtactgagaaatgtgtttggggcaataataccaccggatatgcttaagaaagtttccttgaagtttaatgaatatcagattgaagggatcatatcgaagatgcccgttggattgaaggatcttcaatttatatatatcaatggcagacgttatgcggacagcgcctttcaaggatacgtcgattctttattccaagcacaagatttcggggagaaaggcatgagtttactcaaaactaaaagcgtgggaaaaccgtatcgatcacatcccgtcttcatccttgatgttcggtgcccccaaactatcgatgacctgttacaagatccagcaaagaaaattgttaagccttcccatatacgtaccattgaaccattgatcgttaagaccattcgctcctttctgacatttcaaggatacttaacgcctgataaatcagattcatctttcgaaatagtcaattgttcacagaagacggcaacattgcctgatagtcgaatccaaatcagtaaacgtaatcaagtattaaattcaaaaatgaagattgcacgcattaattcatacataggaaaacccgctgtcaatggatgtagaataaacaatagtacaataaactacgaaaaaatcaagaatataagaatcgacggtcagaaatcaaggttacggaataaactctcttccaggccctacgatagtggttttacagaagattatgacagtataggaaaaaccataacagatttttcaatatcaagatctgtcctggcaaaatatgaagtgattaatcaagtagataaaaaatttattctcatacgttgtttagaccaatctattcataattgcccactattagttctagttgatcaacatgcttgcgatgagaggataagactagaagagctattttatagcctgttgacagaagttgtaaccggaacttttgttgcacgagacctcaaggattgttgcattgaagttgatcgtactgaggctgacttatttaagcattatcaaagtgaatttaaaaagtggggaattggctatgaaacaattgagggaacaatggaaacctcacttttggaaattaaaacactgcctgagatgttaacttccaaatataacggggataaagactacttaaaaatggtcttgctgcaacatgctcatgacctgaaggatttcaaaaaacttccaatggatttatcccatttcgaaaactacacttcggttgataaattatattggtggaagtactcaagctgcgttccaacggtctttcatgaaattcttaacagcaaggcatgcagatctgctgttatgtttggagatgaattaacccggcaagagtgcataattttaattagcaagctctcgcgatgccataacccattcgaatgcgcccacgggagaccttctatggtacccattgcagaattgaagtaa

SEQ ID NO: 11112 - DNA, 2148 bp, Artificial Sequence
  Description of Artificial Sequence: Synthetic polynucleotide
atgagccagcatattaggaaattagattctgatgtttctgaaagacttaaatctcaggcatgcacggtatctttggcaagtgcggttagagaaatagttcaaaattctgtagatgcacacgctaccactatcgacgtcatgatcgacctccctaatttgagctttgcagtttacgatgatggtattggtttgactagaagtgacttgaatatattggccacacaaaattatacttccaaaataagaaagatgaatgatttagtaacgatgaaaacctacggttacagaggagacgccttatatagcatttctaatgtctctaatttatttgtttgttccaagaaaaaggattacaactctgcatggatgagaaaatttccatccaaaagcgtcatgttgagtgagaataccatactcccaatagatcctttttggaaaatttgtccttggagcagaacaaagtctggtactgttgttattgttgaagatatgctttataatttacctgtccgccgcagaatattgaaggaagaaccccctttcaagacttttaacacaataaaggcagatatgttacagatattagtaatgcacccgatgatttctctcaacgtacaatatacagacaaactcagaatcaatacagaagttcttttccgctctaagaacataactgaggggttaacaaagcaccagcaaatgtctcaagtattaagaaatgtgtttggggcaataataccaccggatatgcttaagaaagtttccttgaagtttaatgaatatcagattgaagggatcatatccaagatgcccgttggattgaaggatcttcaatttatatatatcaatggcagacgttatgcggacagcgcctttcaaggatacgtcgattctttattccaagcacaagatttcggggagaaaggcatgagtttactcaaaactaaaagcgtgggaaaaccgtatagaagccatcccgtcttcatccttgatgttcgttgcccccaaactatcgatgacttattacaagatccagcaaagaaaattgttaagccttcccatatacgtaccattgaaccattgatcgttaagaccattcgctcctttttaacatttcaaggatacttaacgcctgataaatctgattcttctttcgaaatagtcaattgttctcagaagacggcaacattgcctgatagtagaatccaaatcagtaaacgtaatcaagtattaaattctaaaatgaagattgcacgcattaattcttacataggaaaacccgctgtcaatggatgtagaataaacaatagtacaataaactacgaaaaaatcaagaatataagaatcgacggtcagaaatctaggttaagaaataaactctcttccaggccctacgatagtggttttacagaagattatgacagtataggaaaaaccataacagatttttccatatctagatctgtcttggcaaaatatgaagtgattaatcaagtagataaaaaatttattctcatacgttgtttagaccaatctattcataattgcccattattagttttggttgatcaacatgcttgcgatgagaggataagattagaagagttattttatagccttttgacagaagttgtaaccggaacttttgttgcaagagacctcaaggattgttgcattgaagttgatcgtactgaggctgacttatttaagcattatcaaagtgaatttaaaaagtggggaattggctatgaaacaattgagggaacaatggaaacctctcttttggaaattaaaacattgcctgagatgttaacttccaaatataacggggataaagactacttaaaaatggtcttgttgcaacatgctcatgacttgaaggatttcaaaaaacttccaatggatttatcccatttcgaaaactacacttctgttgataaattatattggtggaagtactccagctgcgttccaacggtctttcatgaaattcttaacagcaaggcatgcagatctgctgttatgtttggagatgaattaaccagacaagagtgcataattttaattagcaagctctccagatgccataacccattcgaatgcgcccacgggagaccttctatggtacccattgcagaattgaagtga

SEQ ID NO: 11113 - DNA, 783 bp, Saccharomyces cerevisiae
atgattttcaaaatattgtgtagtttactactggtaacctccaacttcgcttctgccttatatgtcaatgaaactacgagctatacaccatacacgaagacattaactccaacatactctgtttcacctcaagagacaacattaacgtacagcgatgaaacaaccaccttctacataacatctactttttactctacctactggttcactacctcccaatcagctgctattattagtacacctactgcaagtacacctactgcaagcacgcctagcctaactacgtccacaaatgaatacaccaccacctattctgacacagacaccacctacacgtctactctgacctctacttacataataactctatctacggaatccgccaacgagaaggctgaacagatttccacgagcgtcacagaaattgcttctacagtaaccgaatcgggcagtacatacacctctactttgacctcaaccttattggttactgtatataattcccaagctagtaatacaatagcgacatccacagctggggacgccgcctccaatgttgatgccttagaaaagttagtctctgctgaacatcaatctcagatgattcaaaccacatccgccgatgaacagtactgtagtgcgtctaccaagtatgttacagttacagctgctgcagttaccgaagtggttactactacggcggagcctgttgttaaatacgttactataactgccgatgctagtaatgttacaggttctgctaacaacggtacccacatttaa

SEQ ID NO: 11114 - DNA, 783 bp, Artificial Sequence
  Description of Artificial Sequence: Synthetic polynucleotide
atgattttcaaaatattgtgtagtttattattggtaacctccaacttcgcttctgccttatatgtcaatgaaactacgagctatacaccatacacgaagacattaactccaacatactctgtttctcctcaagagacaacattaacgtacagcgatgaaacaaccaccttctacataacatctactttttactctacctactggttcactacctcccaatctgctgctattattagtacacctactgcaagtacacctactgcaagcacgcctagcttaactacgtccacaaatgaatacaccaccacctattctgacacagacaccacctacacgtctactttgacctctacttacataataactttatctacggaatccgccaacgagaaggctgaacagatttccacgagcgtcacagaaattgcttctacagtaaccgaaagtggcagtacatacacctctactttgacctccaccttattggttactgtatataattcccaagctagtaatacaatagcgacatccacagctggggacgccgcctccaatgttgatgccttagaaaagttagtctctgctgaacatcaatctcagatgattcaaaccacatccgccgatgaacagtactgtagtgcgtctaccaagtatgttacagttacagctgctgcagttaccgaagtggttactactacggcggagcctgttgttaaatacgttactataactgccgatgctagtaatgttacaggttctgctaacaacggtacccacatttga

SEQ ID NO: 11115 - DNA, 822 bp, Saccharomyces cerevisiae
atgtatgtttctaatgggaaagacacttgccagttgttggggcccgtgtctctttttgtccagacattgatgggtatgacagccgtgattgtgttattggtgaaaagaaactatgagcatccaaggagaaaaatgattgtgtggagttatgacattggaaaacaaatcatcggctctcttggaatccattttttgaatctaggcatcagcatactgaagaaaagacgaaggtcactcttcgcaatcactgcaaaaggcaatgatgatgaggatcaatgcgattggtattttcttaacttactcctggatactactgttgggattcccattctttggttgtgcttatacataattgaaaaagtgctaaaatccttacacttccaaaacattgaaagtggtaattattttccatctaaaaccgttgggagccaccccagaaaacccttattctctgccttcgtgaaacagctgcttatattcattgttgggctgggcgtgatgaagttctgcgtgtttctaatactaaactacttagaagacttggcatactggttcgccgatcttatccttggctggtcagattcatggccaaactttcaagtttttctggtcatgtttgtctttcctatcttactgaattgcttccagtacttttgtgtcgacaatgtcatcaggttacattctgagagcctaacgataaccaatgcagagaattttgaaacgaacacattcctaaatgacgaaattcctgatttatcggaagtctcaaatgaagtgcctaacaaggataacaacatttccagctatggtagcataatatag

SEQ ID NO: 11116 - DNA, 822 bp, Artificial Sequence
  Description of Artificial Sequence: Synthetic polynucleotide
atgtatgtttctaatgggaaagacacttgccagttgttggggcccgtgtctctttttgtccagacattgatgggtatgacagccgtgattgtgttattggtgaaaagaaactatgagcatccaaggagaaaaatgattgtgtggagttatgacattggaaaacaaatcatcggctctcttggaatccattttttgaatttgggcatcagcatattgaagaaaagaagaaggtctctcttcgcaatcactgcaaaaggcaatgatgatgaggatcaatgcgattggtattttcttaacttactcttggatactactgttgggattcccattctttggttgtgcttatacataattgaaaaagtgttgaaatccttacacttccaaaacattgaaagtggtaattattttccatctaaaaccgttgggagccaccccagaaaacccttattctctgccttcgtgaaacagttacttatattcattgttgggttgggcgtgatgaagttctgcgtgtttttaatattaaactacttagaagacttggcatactggttcgccgatcttatccttggctggtctgattcttggccaaactttcaagtttttttagtcatgtttgtctttcctatcttattgaattgcttccagtacttttgtgtcgacaatgtcatcaggttacattctgagagcttaacgataaccaatgcagagaattttgaaacgaacacattcttgaatgacgaaattcctgatttatctgaagtctccaatgaagtgcctaacaaggataacaacatttccagctatggtagcataatatga

SEQ ID NO: 11117 - DNA, 1902 bp, Saccharomyces cerevisiae
atggattacgaagaaattttatttggtctgcaaccgatcctcaatgcgtcttcaataaaggatgttccgatgaacgatgtctacttaggaagctacctagcggtaatggaccaattggctgtttcgttgagagaaccaagtaatagagatattgttggtaaaactgggctgctactgaacctagtaagagtattagaacaagcgcttgatatctgctttcatgatacgagcatttcaattaatgataaaatagcgttttatgagatcagttctgaagtgattagatgtatcgctaacgcaataattgataatgatgataatcgggaaattctcttggattctggaggtaaaaagcttcttaattattatataggcggggttcttcagctggacgaaatttcttctgacaagagtgaggatagcttagtggataaattacagatgcggtcagttgtgctactaaggaatttttgcattggaaatctcaagtatacagaaaatttggctcccttcattagaggtccattatttgttttgttgaaaaccacacaatatagctatttgtcatctcccgaaaaagttgttttaggttcagatttattgaacgatattttaaaagtcaattactcaaatgttcaaataagcgatctctttttcttaagccagtacatcaaaaaaatctcttcaaatgtgcaaaataaagaattgcaggcaatggaagatggagcagtcgaagcatattcaaatactgaaactcagaagttcgctggccaaggaaatcaagagtacatcgaaaaagaggaagaagatgatgaggaggacgttaattgtgaattgctattaaatctgtcaacatgtcttgaaactattgtagccaaggatgaaactataaactttaccaatgaggagcagcttgtgctaagcatgcaaaaaaatttaatattgtccttagtttgcttagaatcaaaaaccttcaataataagctaattgtaatgagaagactcatatcgtgcgcaggcaacatctccgccaacctaacaaactctaacaaacgagagcaatcattatgtatcgaaactattaagagttccgcaagtagttatgccctagccgcagctttgatgatattatgtaactcagttgcatccaaaagtgacgctgtcgcgctactgaagctcatatctcttagtgaattgattcaagttggtagcttgctacaagacccactacaatatcaaggattcctagatttactgaggaagctgttaaatctggaaaataccatgtggctagatatcaaggacctcttcaccctatttcagattatgagaagatgtcacgagcaaactaaatattataacaacctgagatcgttattaacaaatttattaaacaaaactttaacggtgcttccaagttcaaaaatacacaattcaataagcagtgatccaacaattatctcttttatagcagagcatggaacgttaacgtcctgtattgcgatggataagctgcttgtgtccaagaaagcccttcctaaagaagctattacatccctatgggattcgatcttcaaattccaaaatttaggtcaagcagaacaactaagcatctcagatttatttcatatcacaaaaacggttggaatttatttaaaagattcaagtgtaacagctgacgtgaatccgattgaaaatatactattcaaggattacattcaaaagttaaccctgatattagagaccatactttcatttaaagaaaataaagataagggtagcgagagttgtttcaacaatgggaaatttatagcgggcataatactaaacattgtgaaaaatacgaaatgcttaacgccagaggaacaaaatttagaagcgcttgcaaaatcgttcttttag

SEQ ID NO: 11118 - DNA, 1902 bp, Artificial Sequence
  Description of Artificial Sequence: Synthetic polynucleotide
atggattacgaagaaattttatttggtttacaaccgatcctcaatgcgtcttctataaaggatgttccgatgaacgatgtctacttaggaagctacttggcggtaatggaccaattggctgtttctttgagagaaccaagtaatagagatattgttggtaaaactgggttgttgttgaacttggtaagagtattagaacaagcgcttgatatctgctttcatgatacgagcatttccattaatgataaaatagcgttttatgagatcagttctgaagtgattagatgtatcgctaacgcaataattgataatgatgataatagagaaattctcttggattctggaggtaaaaagcttcttaattattatataggcggggttcttcagttagacgaaatttcttctgacaagagtgaggatagcttagtggataaattacagatgagatctgttgtgcttttgaggaatttttgcattggaaatctcaagtatacagaaaatttggctcccttcattagaggtccattatttgttttgttgaaaaccacacaatatagctatttgtcttctcccgaaaaagttgttttaggttctgatttattgaacgatattttaaaagtcaattactctaatgttcaaataagcgatctctttttcttaagccagtacatcaaaaaaatctcttccaatgtgcaaaataaagaattgcaggcaatggaagatggagcagtcgaagcatattctaatactgaaactcagaagttcgctggccaaggaaatcaagagtacatcgaaaaagaggaagaagatgatgaggaggacgttaattgtgaattgttattaaatttatctacatgtcttgaaactattgtagccaaggatgaaactataaactttaccaatgaggagcagcttgtgttgagcatgcaaaaaaatttaatattgtccttagtttgcttagaaagtaaaaccttcaataataagttgattgtaatgagaagactcatatcttgcgcaggcaacatctccgccaacttaacaaactctaacaaaagagagcaatctttatgtatcgaaactattaagagttccgcaagtagttatgccttggccgcagctttgatgatattatgtaactctgttgcatccaaaagtgacgctgtcgcgttattgaagctcatatctcttagtgaattgattcaagttggtagcttgttgcaagacccattgcaatatcaaggattcttggatttattgaggaagcttttaaatttggaaaataccatgtggcttgatatcaaggacctcttcaccttatttcagattatgagaagatgtcacgagcaaactaaatattataacaacttgagatctttattaacaaatttattaaacaaaactttaacggtgcttccaagttctaaaatacacaattctataagcagtgatccaacaattatctcttttatagcagagcatggaacgttaacgtcctgtattgcgatggataagcttcttgtgtccaagaaagcccttcctaaagaagctattacatccttatgggattctatcttcaaattccaaaatttaggtcaagcagaacaattgagcatcagtgatttatttcatatcacaaaaacggttggaatttatttaaaagattctagtgtaacagctgacgtgaatccgattgaaaatatattattcaaggattacattcaaaagttaaccttaatattagagaccatactttcttttaaagaaaataaagataagggtagcgagagttgtttcaacaatgggaaatttatagcgggcataatattaaacattgtgaaaaatacgaaatgcttaacgccagaggaacaaaatttagaagcgcttgcaaaatctttcttttga

SEQ ID NO: 11119 - DNA, 3273 bp, Saccharomyces cerevisiae
atgtcttctggtttggtcttagaaaacacggcacgtagagatgcgttaatcgccatcgaaaagaagtaccaaaaaatatgggctgaagagcaccaatttgaaatcgatgcgccatcaatcgaagatgagcccattacaatggactctgaagagttacatcgcacgtatcctaaattcatgtcgtctatggcctatccttatatgaacggtgttatgcacgccggccattgttttactctctccaaagtcgaattttctattggttttgaaaggatgaacggtaaaagagctttgtttccattgggttttcactgtacaggtatgccaatcttagcatgtgccgataaactaaagagggaagccgaactttttggcaagaacttcgacaatgtaccagcagaagaagaagaaattaaagaagaaacgccggctgagaaagaccacgaggatgttaccaaattcaaagctaaaaaatctaaagccgcagccaagaagggccgtggtaagtaccaattcgaaatcatgttacagcttggtatccctagagaagaaatcattaagttcgccgacgccaagtactggttgacctatttcccacctttgtgtgaaagtgattgtacttcacttggggctcgtatcgattggagacgttcttttgtcaccactgatgccaatccttattacgatgcctttattagatggcaaatgaacaagttaaaggctgctggtaaaatcaaattcggtgaacgttatactatttactctgaaaaagatggtcaagcttgtatggatcacgatagacaatccggtgaaggtgttacaccacaagaatatattggtgtgaaaattgaagctttagagttcgccgatgatgccgcaaaaatcattgattcaagctcagatcttgacaaatccaaaaaattctactttgtcgctgccacgttgagaccggaaactatgtatggacaaacatgttgttttgtttctccaacaattgagtatggtatatttgacgctggtgattcttattttatcactactgaacgtgcattcaagaacatgtcttaccaaaagctaacaccaaagagaggcttctacaagccgatagttactgtcccaggtaaggcatttatcggtaccaagattcatgccccacaatctgtatatccagaactaagaatattgcctatggaaactgtcattgctaccaagggtactggtgtcgtcacgtgtgtaccatctaattcaccagatgactacattaccaccaaggacttgttgcacaaacctgaatactacggcattaaacctgaatggattgaccatgaaattgttccaattatgcataccgaaaagtatggtgatttaactgcaaaggctattgttgaagaaaaaaaaattcaatctccaaaggataagaacttgttagcagaagccaagaaaattgcttacaaggaagattactacactggtaccatgatatatggtccttataaaggtgagaaggtcgaacaagccaaaaacaaggttaaggctgatatgattgccgccggtgaagctttcgtctacaacgaaccagaatctcaggtcatgtcacgttctggtgatgactgtatcgtttctttggaagatcaatggtacgttgattacggtgaagaaagttggaagaaacaagcaattgaatgtttggaagggatgcaattatttgctcctgaggtaaaaaacgcatttgaaggtgttttggattggttgaaaaactgggctgtttgccgtacatacgggttaggtaccagattgccttgggatgaaaaatacttagttgagtctttatcagactctactatttatcaatcattttataccattgctcacttactatttaaggattattatggtaacgaaattggaccattaggcatttcagctgatcaaatgacagatgaggttttcgattacattttccaacatcaggatgatgtcaagaacaccaatattcctttgcctgctttacaaaagttgagaagggaatttgagtatttctacccattagacgtctcaatttccgggaaggatttgatccctaaccatttaactttcttcatttacacacatgttgcattattcccaaagaaattctggcctaaaggtatcagagctaacggtcatttgatgttaaacaattctaaaatgtcgaaatctacaggtaattttatgactttagaacaaacggttgaaaagttcggtgctgatgcagctcgtattgcgtttgccgatgcgggagatactgttgaagatgcaaattttgacgaatctaacgctaatgctgctattctgagattattcaatttgaaggagtgggcagaagaaattaccaaggaatctaacttgagaactggggaaattacagatttctttgatatcgcgtttgaacacgaaatgaatgctctgattgaaaagacttatgaacagtatgcattgactaattataagaatgccttgaaatacggtctttttgatttccaagctgctagggattactatcgtgaagctagtggtgtaatgcataaagatttaattgcacgttatattgaaacacaagccttattgctggctccaattgcgcctcatttcgctgagtatatttaccgtgaagttctaggtaaccaaacctctgtacaaaatgccaaatttccacgtgcatccaaaccagtagataagggtgttctggctgctttggattacttgagaaatctacagagaagcataagagaaggcgaagggcaagcactaaaaaagaagaagggcaagtctgctgaaatcgatgcatccaaacctgttaagttgactttattgatctctgaatcatttccagaatggcaatcacaatgcgtggaaatcgtccgtaaactattcagcgaacagactttagacgataacaaaaaggtcagagagcatattgagcctaaagaaatgaagagagctatgccattcatttctctattgaaacaacgtttagctaatgaaaagccagaggatgtgtttgaaagagagttacaattcagcgaaatcgatactgtcaaggctgctgcaaggaatgttaagaaggcagcacaagctttgaaaattgctgaatttagcgcaatttctttcccatatggcgccaaaaccggtaaggatatctttactggtgaagaagttgaaattccacctgtaacaaagattgttgaaaatgctgttccaggtaacccaggtgttgtcttccaaaatatttaa

SEQ ID NO: 11120 - DNA, 3273 bp, Artificial Sequence
  Description of Artificial Sequence: Synthetic polynucleotide
atgtcttctggtttggtcttagaaaacacggcacgtagagatgcgttaatcgccatcgaaaagaagtaccaaaaaatatgggctgaagagcaccaatttgaaatcgatgcgccatccatcgaagatgagcccattacaatggactctgaagagttacatcgcacgtatcctaaattcatgtcttctatggcctatccttatatgaacggtgttatgcacgccggccattgttttactctctccaaagtcgaattttctattggttttgaaaggatgaacggtaaaagagctttgtttccattgggttttcactgtacaggtatgccaatcttagcatgtgccgataaattgaagagggaagccgaactttttggcaagaacttcgacaatgtaccagcagaagaagaagaaattaaagaagaaacgccggctgagaaagaccacgaggatgttaccaaattcaaagctaaaaaatctaaagccgcagccaagaagggccgtggtaagtaccaattcgaaatcatgttacagcttggtatccctagagaagaaatcattaagttcgccgacgccaagtactggttgacctatttcccacctttgtgtgaaagtgattgtacttctcttggggctcgtatcgattggagacgttcttttgtcaccactgatgccaatccttattacgatgcctttattagatggcaaatgaacaagttaaaggctgctggtaaaatcaaattcggtgaacgttatactatttactctgaaaaagatggtcaagcttgtatggatcacgatagacaatccggtgaaggtgttacaccacaagaatatattggtgtgaaaattgaagctttagagttcgccgatgatgccgcaaaaatcattgattctagcagtgatcttgacaaatccaaaaaattctactttgtcgctgccacgttgagaccggaaactatgtatggacaaacatgttgttttgtttctccaacaattgagtatggtatatttgacgctggtgattcttattttatcactactgaacgtgcattcaagaacatgtcttaccaaaagttaacaccaaagagaggcttctacaagccgatagttactgtcccaggtaaggcatttatcggtaccaagattcatgccccacaatctgtatatccagaattgagaatattgcctatggaaactgtcattgctaccaagggtactggtgtcgtcacgtgtgtaccatctaattctccagatgactacattaccaccaaggacttgttgcacaaacctgaatactacggcattaaacctgaatggattgaccatgaaattgttccaattatgcataccgaaaagtatggtgatttaactgcaaaggctattgttgaagaaaaaaaaattcaatctccaaaggataagaacttgttagcagaagccaagaaaattgcttacaaggaagattactacactggtaccatgatatatggtccttataaaggtgagaaggtcgaacaagccaaaaacaaggttaaggctgatatgattgccgccggtgaagctttcgtctacaacgaaccagaatctcaggtcatgtcccgttctggtgatgactgtatcgtttctttggaagatcaatggtacgttgattacggtgaagaaagttggaagaaacaagcaattgaatgtttggaagggatgcaattatttgctcctgaggtaaaaaacgcatttgaaggtgttttggattggttgaaaaactgggctgtttgccgtacatacgggttaggtaccagattgccttgggatgaaaaatacttagttgagtctttaagtgactctactatttatcaaagtttttataccattgctcacttactttttaaggattattatggtaacgaaattggaccattaggcatttctgctgatcaaatgacagatgaggttttcgattacattttccaacatcaggatgatgtcaagaacaccaatattcctttgcctgctttacaaaagttgagaagggaatttgagtatttctacccattagacgtctctatttccgggaaggatttgatccctaaccatttaactttcttcatttacacacatgttgcattattcccaaagaaattctggcctaaaggtatcagagctaacggtcatttgatgttaaacaattctaaaatgtccaaatctacaggtaattttatgactttagaacaaacggttgaaaagttcggtgctgatgcagctcgtattgcgtttgccgatgcgggagatactgttgaagatgcaaattttgacgaatctaacgctaatgctgctattttaagattattcaatttgaaggagtgggcagaagaaattaccaaggaatctaacttgagaactggggaaattacagatttctttgatatcgcgtttgaacacgaaatgaatgctttgattgaaaagacttatgaacagtatgcattgactaattataagaatgccttgaaatacggtctttttgatttccaagctgctagggattactatcgtgaagctagtggtgtaatgcataaagatttaattgcacgttatattgaaacacaagccttattgttggctccaattgcgcctcatttcgctgagtatatttaccgtgaagttttaggtaaccaaacctctgtacaaaatgccaaatttccacgtgcatccaaaccagtagataagggtgttttggctgctttggattacttgagaaatttacagagaagcataagagaaggcgaagggcaagcattgaaaaagaagaagggcaagtctgctgaaatcgatgcatccaaacctgttaagttgactttattgatctctgaaagttttccagaatggcaatctcaatgcgtggaaatcgtccgtaaattattcagcgaacagactttagacgataacaaaaaggtcagagagcatattgagcctaaagaaatgaagagagctatgccattcatttctttgttgaaacaacgtttagctaatgaaaagccagaggatgtgtttgaaagagagttacaattcagcgaaatcgatactgtcaaggctgctgcaaggaatgttaagaaggcagcacaagctttgaaaattgctgaatttagcgcaatttctttcccatatggcgccaaaaccggtaaggatatctttactggtgaagaagttgaaattccacctgtaacaaagattgttgaaaatgctgttccaggtaacccaggtgttgtcttccaaaatatttga

SEQ ID NO: 11121 - DNA, 762 bp, Saccharomyces cerevisiae
atgttgaagctagctcgtccatttattccgcctttatcaaggaacaatgccatttcttcaggaatagttctcacttctagaagatttcagtcttcctttacgttcttaagtaaccagtctttactatctaaaaatcaaatgaaatccaaaagaaaaaagggcagtaaaaaggcagcgtaccatcgtcaacccccggaacacgaacatactgcaccacttataaagcaaaacaagacaatcacaaagaaagaacatagcgatgtgagaggttctcatttaaaaaagaaaagaagcgatttttcgtggctaccaagagtaccatccacctcacatttaaagcagagtgacatgaccacaaatgtactctattctggatatagacccttattcatcaatcccaatgacccgaagctaaaggaagacaccggaagtacgttatacgaatttgcgatgaagcttgaagatttaaatgaacctctatcaccatggatttcctctgccactggacttgaattcttttcagagtgggagaatatacctagtgaactactgaaaaatttgaagccttttcatccacctaaggaaaaatcaatgaacacaaatgagcttattcatgtaagtgctaagagaaatacattagttgacaataaaacaagtgagacgcttcagcggaaaatggatgaattttcaaagagaagaggaaaggggagaaaaaagtcagtagtgacgttgctccaaatgaagaaaaaacttgagggatga

SEQ ID NO: 11122 - DNA, 762 bp, Artificial Sequence
  Description of Artificial Sequence: Synthetic polynucleotide
atgttgaagttggctcgtccatttattccgcctttatctaggaacaatgccatttcttctggaatagttctcacttctagaagatttcagtcttcctttacgttcttaagtaaccagtctttattatctaaaaatcaaatgaaatccaaaagaaaaaagggcagtaaaaaggcagcgtaccatcgtcaacccccggaacacgaacatactgcaccacttataaagcaaaacaagacaatcacaaagaaagaacatagcgatgtgagaggttctcatttaaaaaagaaaagaagcgatttttcttggttaccaagagtaccatccaccagtcatttaaagcagagtgacatgaccacaaatgtactctattctggatatagacccttattcatcaatcccaatgacccgaagttgaaggaagacaccggaagtacgttatacgaatttgcgatgaagcttgaagatttaaatgaacctttatctccatggatttcctctgccactggacttgaattcttttctgagtgggagaatatacctagtgaattattgaaaaatttgaagccttttcatccacctaaggaaaaatctatgaacacaaatgagcttattcatgtaagtgctaagagaaatacattagttgacaataaaacaagtgagacgcttcagagaaaaatggatgaattttccaagagaagaggaaaggggagaaaaaagagtgtagtgacgttgctccaaatgaagaaaaaacttgagggatga

SEQ ID NO: 11123 - DNA, 2277 bp, Saccharomyces cerevisiae
atgatcatcagagctccaataaggacaaaaaccaagtcgtttagaggcgatcaaatggattttaaattcccgtctaacgaaagtttaccaagaggaacgctagaagagtaccatttgaataatcatcatcttttaaatgatgtgtttgcagcagaaaatggagtttctcgcgatgaagacggaaactctcaaacattatcagactatacatccacttccaatacaaatacaaattccggttattcatcaaatggatactattcatttgctaacatttctgacaatactacgtcttcaccacgtattgtaatcaatcaaaatgaaaccgctagattaacttcctcagactcgaacaaaagtgacttttttgcttctcatgacttcccaggaaatgactctcttcattatagcagctcaaatgtagttaaaaaccagttacattcaatggaagctattccagagggaaacataactggctcaatctcaacggcattccagactatcccaacagcagataatgtttcctacgatatcgcgccgtcatcagcatcatcgttattaccaaggaaatcgacatctaaaagcgccattctgccgtcgacccaagaagccaaaccgatgaccaaattaaatatggaaaaggatataaaaactatcgaattaaacaatagcgtagtaccgaaacctaaaaaaaagctaaacagagttccgaccataagacgagttgaatcctcgaggttttccaattccaggtatagttcaagtgtcagcagtaaatcaagtagcagtcgttgttctctaaaacgatcaaaagctattagatgtaagggcggactcttatattatttcacctcattgggaatcaagataaagaaaaagttacggaaattacggctagttttaagaagaagactgttttcatataatgttcaaaaggtcccctccgccacgaattccaaaaccactaaatctaaagcaaacattaacaacaagtcaaaaaaaagagggacgaacctagtcaacaaaaacagcaactctactccgcgtcaaaaaaaatcgcagagatacgtctctaatttacaacggtcgatctcatcaaaatctttagtacctgtattggctccacaaaaaaagactaaacctttgacagttgatacgaaatttaaagcaaaccatccccaatctgaagattccaaagttggatcaaacaccccaaggagccctttggtaagctatactccatcattgagaagaacaaattcctctattagaagggctgcatccatcctaaccgcatctgccactatgacaccggcaaataataaaaactccttcatttctgtaccggataatgttagtcatgccgtcactcgcaacagcagcatgtactcgaggtcaagattggtaaggtcaaaaccatcgacggccctaaatgcaattgcaagacagccatcaattgtggtagaaaataaagttattccgttatccatgaatcgatattctattaaagaggaagacgaatatgtaattgatactagttctatgagagaattatctcccgttaatagcgtttgctcatctgattatgacagagaatcatctgaaagctactctaattatgcggatgcaatggagacaacggaagtagataataaggacagagttgaatgcaacaatgaaattcaaaatgtggatgcaaataatgaggaaacttcaaatgaagagagttacaatttgatgaaacattatttaagcaccgtaattgctcaaagaattatgctcagggtacaaattgctcgtatacaaaattataagagcaatgttgtttatatgaataaatcagcagaaacaaactcaactatctacgaagatcttgtcgattctctattaactgaatatgaggctgatggtagctcctcccaaatatttgatggcgttacagtaagggccgacgaggaagaagaagaagatgaagatgatgaagatgatgaagaagaagaagaagaaaatgatgatgaagaagatgaagaagatgaagaagatgatgaagatgatgaagaagaagaagaaaaaagaaaagaaggagaaggaagaaatttggcaaaagaggtagacgaattagcggaattaagtccgatgagaaaacaaagcgatttgagtattacgttaagatctccatttgctatgctaaatcctgcctactcaaacagcattatatcgctaccaacaggtgtggtcaagaggtcattgactcttcctgtcggtatgaaaatttaa

SEQ ID NO: 11124 - DNA, 2277 bp, Artificial Sequence
  Description of Artificial Sequence: Synthetic polynucleotide
atgatcatcagagctccaataaggacaaaaaccaagagctttagaggcgatcaaatggattttaaattcccgtctaacgaaagtttaccaagaggaacgttagaagagtaccatttgaataatcatcatcttttaaatgatgtgtttgcagcagaaaatggagtttctcgcgatgaagacggaaactctcaaacattaagtgactatacatccacttccaatacaaatacaaattccggttattcttccaatggatactattcttttgctaacatttctgacaatactacgtcttctccacgtattgtaatcaatcaaaatgaaaccgctagattaacttccagtgactccaacaaaagtgacttttttgcttctcatgacttcccaggaaatgactctcttcattatagcagcagtaatgtagttaaaaaccagttacattctatggaagctattccagagggaaacataactggctccatctctacggcattccagactatcccaacagcagataatgtttcctacgatatcgcgccgtcttctgcatcttctttattaccaaggaaatctacatctaaaagcgccattttaccgtccacccaagaagccaaaccgatgaccaaattaaatatggaaaaggatataaaaactatcgaattaaacaatagcgtagtaccgaaacctaaaaaaaagttgaacagagttccgaccataagaagagttgaatccagcaggttttccaattccaggtatagtagtagtgtcagcagtaaatctagtagcagtcgttgttctttgaaaagaagtaaagctattagatgtaagggcggactcttatattatttcacctctttgggaatcaagataaagaaaaagttaagaaaattaaggttggttttaagaagaagattattttcttataatgttcaaaaggtcccctccgccacgaattccaaaaccactaaatctaaagcaaacattaacaacaagagtaaaaaaagagggacgaacttggtcaacaaaaacagcaactctactccgcgtcaaaaaaaatctcagagatacgtctctaatttacaaagatctatctcttctaaatctttagtacctgtattggctccacaaaaaaagactaaacctttgacagttgatacgaaatttaaagcaaaccatccccaatctgaagattccaaagttggaagtaacaccccaaggagccctttggtaagctatactccatctttgagaagaacaaattcctctattagaagggctgcatccatcttgaccgcatctgccactatgacaccggcaaataataaaaactccttcatttctgtaccggataatgttagtcatgccgtcactcgcaacagcagcatgtactctaggagcagattggtaaggtccaaaccatctacggccttgaatgcaattgcaagacagccatctattgtggtagaaaataaagttattccgttatccatgaatagatattctattaaagaggaagacgaatatgtaattgatactagttctatgagagaattatctcccgttaatagcgtttgctcttctgattatgacagagaaagctctgaaagctactctaattatgcggatgcaatggagacaacggaagtagataataaggacagagttgaatgcaacaatgaaattcaaaatgtggatgcaaataatgaggaaacttccaatgaagagagttacaatttgatgaaacattatttaagcaccgtaattgctcaaagaattatgctcagggtacaaattgctcgtatacaaaattataagagcaatgttgtttatatgaataaatctgcagaaacaaactctactatctacgaagatcttgtcgattctttattaactgaatatgaggctgatggtagctcctcccaaatatttgatggcgttacagtaagggccgacgaggaagaagaagaagatgaagatgatgaagatgatgaagaagaagaagaagaaaatgatgatgaagaagatgaagaagatgaagaagatgatgaagatgatgaagaagaagaagaaaaaagaaaagaaggagaaggaagaaatttggcaaaagaggtagacgaattagcggaattaagtccgatgagaaaacaaagcgatttgagtattacgttaagatctccatttgctatgttgaatcctgcctactctaacagcattatatctttaccaacaggtgtggtcaagaggtctttgactcttcctgtcggtatgaaaatttga

SEQ ID NO: 11125 - DNA, 948 bp, Saccharomyces cerevisiae
atgggaaggacatttattcatgcttcgaaaataaaacatgcggcacgcaaaagaaaacatcattccaactttagaactctgatcaaattattgaacaatgatgcctataagatagaatcatcaaaaccgttgaaaaatggtaaacttttcaaatactggaaaaataggcgtagattgttttcaaagatagattcggcgtcgatatatatgactgatgagctgtggttcagtgtgacgcccgaaagaattgcctgcttcctggcaaattttgttaaggcatgcatgccaaatgccgaaagaatactggatgttttctgtggtgggggcgggaacaccatacaatttgccatgcaatttccttacgtctatggagtggactacagtattgaacacatatattgtactgcgaaaaacgcccaaagctacggtgtggacgacagaatatggctgaagcggggatcctggaaaaagctagtctctaagcagaaactttccaaaataaagtacgactgtgtatttggatcacccccgtggggtggtccagaatacttaagaaacgatgtgtatgacttagagcaacatctaaagcctatggggattaccaagatgttgaaaagttttcttaaactaagccctaatgtgattatgtttttgccaaggaactctgatttgaaccagctttctcgagctacgaggaaagtactaggtccatttgccaaatgtaaagtattatatgtaaaggagaatggatatatgaaaggaatattttgcatgtggggggaatgcttttttaactacgaaccagcaagtacggagaatagtcgaagggagtcgtccgaaaaggaagagctgagttctgaaaacgaagagctctcgaaaagaaaaaagcatgaatccacaacaacgaccaaagataatactgtagacatttacgacgtaaatggttaa

SEQ ID NO: 11126 - DNA, 948 bp, Artificial Sequence
  Description of Artificial Sequence: Synthetic polynucleotide
atgggaaggacatttattcatgcttccaaaataaaacatgcggcacgcaaaagaaaacatcattccaactttagaactttgatcaaattattgaacaatgatgcctataagatagaatcttctaaaccgttgaaaaatggtaaacttttcaaatactggaaaaataggcgtagattgttttccaagatagattctgcgtctatatatatgactgatgagttatggttcagtgtgacgcccgaaagaattgcctgcttcttggcaaattttgttaaggcatgcatgccaaatgccgaaagaatattggatgttttctgtggtgggggcgggaacaccatacaatttgccatgcaatttccttacgtctatggagtggactacagtattgaacacatatattgtactgcgaaaaacgcccaaagctacggtgtggacgacagaatatggttaaagagaggatcctggaaaaagttggtctctaagcagaaactttccaaaataaagtacgactgtgtatttggaagtcccccgtggggtggtccagaatacttaagaaacgatgtgtatgacttagagcaacatttgaagcctatggggattaccaagatgttgaaaagttttcttaaattaagccctaatgtgattatgtttttgccaaggaactctgatttgaaccagctttctagagctacgaggaaagtattgggtccatttgccaaatgtaaagtattatatgtaaaggagaatggatatatgaaaggaatattttgcatgtggggggaatgcttttttaactacgaaccagcaagtacggagaatagtagaagggagtcttccgaaaaggaagagttgagttctgaaaacgaagagctctctaaaagaaaaaagcatgaatccacaacaacgaccaaagataatactgtagacatttacgacgtaaatggttga

SEQ ID NO: 11127 - DNA, 855 bp, Saccharomyces cerevisiae
atgatagcggattcatcagttttgaaaaagcacacagcaatcaagagaagtacgagaataatatcgctaacactcgttttgcttggcgtatttagcttcttactacttacatggaatgactccttggaattctacaactctgctgaccctagcgaaaacaaaaaaaatagtgaggaagaaagtgaaaagaagttcgtttacaagttgccaaacttattaaagacagcagacagttttctaagtaatgaaaatgaactaaatttccaaaaagtcaaagaagaaatttcaaatattcaaagcgaggttgaagtcgacatcccagaaccctcatccaaagctacatcaaaattttcttcaagatcgttccaaactgataatgtcgtgacggcgacgaccacaacaacactaaatccacggtcatcttctctggccttgcagaaaaactgcgatcacaaaaaattcgaccctagaacagattttctagatataataagaacctctccagcggtattattcattaaatcatcacaagcagactccattttcttaaaaaatctattacaaagagaatttgagatttcacccgaattggccactgttgatttggaaaaacactctcatggctatgaattagaaaagtatatcaaacaaaataaactaaatatcgatactagtgctgccttggaatccattcagtcgccttatttatttttgaatggtatttccgtgataaatcgtggaatggtgagagatataatcgaacctcattcgaagggattgctactacctcttctaaagtctgaagcgcgtggcaacttgctggtagaaaaaaaagacatcccttctaattcttaa

SEQ ID NO: 11128 - DNA, 855 bp, Artificial Sequence
  Description of Artificial Sequence: Synthetic polynucleotide
atgatagcggattcttctgttttgaaaaagcacacagcaatcaagagaagtacgagaataatatctttaacactcgttttgcttggcgtatttagcttcttattacttacatggaatgactccttggaattctacaactctgctgaccctagcgaaaacaaaaaaaatagtgaggaagaaagtgaaaagaagttcgtttacaagttgccaaacttattaaagacagcagacagttttttgagtaatgaaaatgaattgaatttccaaaaagtcaaagaagaaatttctaatattcaaagcgaggttgaagtcgacatcccagaaccctcttccaaagctacaagtaaattttcttctagatctttccaaactgataatgtcgtgacggcgacgaccacaacaacattaaatccaagatcttcttctttggccttgcagaaaaactgcgatcacaaaaaattcgaccctagaacagattttttggatataataagaacctctccagcggtattattcattaaatcttctcaagcagactccattttcttaaaaaatttattacaaagagaatttgagatttctcccgaattggccactgttgatttggaaaaacactctcatggctatgaattagaaaagtatatcaaacaaaataaattgaatatcgatactagtgctgccttggaatccattcagtctccttatttatttttgaatggtatttccgtgataaatcgtggaatggtgagagatataatcgaacctcattctaagggattgttattgcctcttttgaagtctgaagcgcgtggcaacttgttagtagaaaaaaaagacatcccttctaattcttga

SEQ ID NO: 11129 - DNA, 2121 bp, Saccharomyces cerevisiae
atgattcaaaaaatgagcccaagcttaaggaggccatcaacgaggtctagttctggttcaagtaatatcccacaatcgccctctgtacgatcaacttcatcgttttctaatctgacaagaaactccatacggagcacctctaattcgggttctcagtcgatttctgcatcttccactagaagtaactccccactaagatccgtatcagccaaatccgatcccttccttcacccaggtaggataaggatcaggcggagcgacagtattaacaacaactcgagaaaaaacgatacatatactgggtcaatcactgtgaccatccggccgaaaccacggagcgttggaacttcccgtgaccatgtggggctaaaatcgcccaggtactctcaaccaagatccaactcacatcacggtagcaatacatttgttagagacccctggtttattactaatgacaaaacaatagtgcatgaagaaattggagagttcaagttcgatcatgtttttgcttcccattgcactaatttggaagtttatgaaagaaccagtaaaccaatgattgataagttattgatggggtttaatgccaccatatttgcgtacggtatgaccgggtcaggtaaaacgtttacaatgagcggaaatgaacaagagctaggcctaattcctttatctgtgtcgtatttatttaccaatatcatggaacaatcaatgaatggcgataaaaagttcgacgttataatatcgtacctcgaaatttacaatgaaaggatttacgacctgttagaaagcggattagaagaatccggtagtagaatcagtactccttcaaggttatatatgagcaagagcaacagcaatggattgggcgtagaattaaaaatcagagatgactctcagtatggggtcaaagttatcggtctcaccgaaagaagatgtgaaagtagtgaagaattattgaggtggattgcagttggtgacaaaagtaggaaaattggcgaaactgactacaatgcaagaagctcacgatctcatgccattgtactgattcgtttaacaagtactaacgtaaagaacggcacctcaagatcgagtacattgtcgttgtgtgacctagcaggttcggaaagggctacggggcaacaagagaggagaaaggaaggttcattcatcaacaaatccttacttgctttggggactgtgatatccaaactcagtgccgacaagatgaactcagtaggctcaaacattccctcgccatctgcaagtggcagtagcagcagtagtggaaatgctaccaataacggcactagcccaagcaaccacattccatatcgtgattctaaattgactagattattgcagccggcactaagcggtgacagcatagtgacaacgatatgtacagtcgacaccagaaatgatgcggcagcggaaactatgaatacgctgaggtttgcatcaagagcgaaaaacgtcgcacttcatgtatccaaaaaatccatcatcagtaacgggaataacgatggagataaagatcgcaccattgagctactgagacgccaattggaagaacaacgtaggatgatctctgaattgaagaaccgttcaaacattggcgagcccttaaccaaatcttccaatgaaagtacttataaagacattaaagccaccggcaatgatggtgatccgaatttggctctaatgagagcggagaatcgagtattaaaatataaactagagaattgtgaaaaactactagataaagatgtggttgatttgcaagattctgagattatggaaattgtagaaatgcttccctttgaggtcggcacccttttggaaacaaagttccaaggtttggaatcacaaataaggcaatataggaaatacactcaaaaacttgaagacaagatcatggcgctagaaaaaagtggtcatactgcaatgtcgctaactgggtgtgacggcactgaagtgatcgaattacagaagatgctcgagaggaaggataaaatgattgaggccctgcagagtgccaaacgactgcgggatagggctttgaaaccactcattaatacacagcaatcaccgcaccctgtcgtggataacgataaatga

SEQ ID NO: 11130 - DNA, 2121 bp, Artificial Sequence
  Description of Artificial Sequence: Synthetic polynucleotide
atgattcaaaaaatgagcccaagcttaaggaggccatctacgaggtctagttctggtagtagtaatatcccacaatctccctctgtaagatctacttcttctttttctaatttgacaagaaactccataagaagcacctctaattctggttctcagagtatttctgcatcttccactagaagtaactccccattgagatccgtatctgccaaatccgatcccttccttcacccaggtaggataaggatcaggagaagcgacagtattaacaacaactctagaaaaaacgatacatatactgggtctatcactgtgaccatcagaccgaaaccaagaagcgttggaacttcccgtgaccatgtggggttgaaaagtcccaggtactctcaaccaagatccaactctcatcacggtagcaatacatttgttagagacccctggtttattactaatgacaaaacaatagtgcatgaagaaattggagagttcaagttcgatcatgtttttgcttcccattgcactaatttggaagtttatgaaagaaccagtaaaccaatgattgataagttattgatggggtttaatgccaccatatttgcgtacggtatgaccgggtctggtaaaacgtttacaatgagcggaaatgaacaagagttgggcttaattcctttatctgtgtcttatttatttaccaatatcatggaacaatctatgaatggcgataaaaagttcgacgttataatatcttacctcgaaatttacaatgaaaggatttacgacttattagaaagcggattagaagaatccggtagtagaatcagtactccttctaggttatatatgagcaagagcaacagcaatggattgggcgtagaattaaaaatcagagatgactctcagtatggggtcaaagttatcggtctcaccgaaagaagatgtgaaagtagtgaagaattattgaggtggattgcagttggtgacaaaagtaggaaaattggcgaaactgactacaatgcaagaagcagcagatctcatgccattgtacttattcgtttaacaagtactaacgtaaagaacggcacctccagaagtagtacattgtctttgtgtgacttggcaggttctgaaagggctacggggcaacaagagaggagaaaggaaggttctttcatcaacaaatccttacttgctttggggactgtgatatccaaactcagtgccgacaagatgaactctgtaggctctaacattccctctccatctgcaagtggcagtagcagcagtagtggaaatgctaccaataacggcactagcccaagcaaccacattccatatcgtgattctaaattgactagattattgcagccggcattaagcggtgacagcatagtgacaacgatatgtacagtcgacaccagaaatgatgcggcagcggaaactatgaatacgttgaggtttgcatctagagcgaaaaacgtcgcacttcatgtatccaaaaaatccatcatcagtaacgggaataacgatggagataaagatcgcaccattgagttattaagacgccaattggaagaacaacgtaggatgatctctgaattgaagaaccgttctaacattggcgagcccttaaccaaatcttccaatgaaagtacttataaagacattaaagccaccggcaatgatggtgatccgaatttggctttgatgagagcggagaatagagtattaaaatataaattagagaattgtgaaaaattattagataaagatgtggttgatttgcaagattctgagattatggaaattgtagaaatgcttccctttgaggtcggcacccttttggaaacaaagttccaaggtttggaatctcaaataaggcaatataggaaatacactcaaaaacttgaagacaagatcatggcgttagaaaaaagtggtcatactgcaatgtctttgactgggtgtgacggcactgaagtgatcgaattacagaagatgctcgagaggaaggataaaatgattgaggccttgcagagtgccaaaagattaagagatagggctttgaaaccactcattaatacacagcaatctccgcaccctgtcgtggataacgataaatga

SEQ ID NO: 11131 - DNA, 1218 bp, Saccharomyces cerevisiae
atgttcagcttgaaagcattattgccattggccttgttgttggtcagcgccaaccaagttgctgcaaaagtccacaaggctaaaatttataaacacgagttgtccgatgagatgaaagaagtcactttcgagcaacatttagctcatttaggccaaaagtacttgactcaatttgagaaagctaaccccgaagttgttttttctagggagcatcctttcttcactgaaggtggtcacgatgttccattgacaaattacttgaacgcacaatattacactgacattactttgggtactccacctcaaaacttcaaggttattttggatactggttcttcaaacctttgggttccaagtaacgaatgtggttccttggcttgtttcctacattctaaatacgatcatgaagcttcatcaagctacaaagctaatggtactgaatttgccattcaatatggtactggttctttggaaggttacatttctcaagacactttgtccatcggggatttgaccattccaaaacaagacttcgctgaggctaccagcgagccgggcttaacatttgcatttggcaagttcgatggtattttgggtttgggttacgataccatttctgttgataaggtggtccctccattttacaacgccattcaacaagatttgttggacgaaaagagatttgccttttatttgggagacacttcaaaggatactgaaaatggcggtgaagccacctttggtggtattgacgagtctaagttcaagggcgatatcacttggttacctgttcgtcgtaaggcttactgggaagtcaagtttgaaggtatcggtttaggcgacgagtacgccgaattggagagccatggtgccgccatcgatactggtacttctttgattaccttgccatcaggattagctgaaatgattaatgctgaaattggggccaagaagggttggaccggtcaatatactctagactgtaacaccagagacaatctacctgatctaattttcaacttcaatggctacaacttcactattgggccatacgattacacgcttgaagtttcaggctcctgtatctctgcaattacaccaatggatttcccagaacctgttggcccactggccatcgttggtgatgccttcttgcgtaaatactattctatttacgatttgggcaacaatgcggttggtttggccaaagcaatttga

SEQ ID NO: 11132 - DNA, 1218 bp, Artificial Sequence
  Description of Artificial Sequence: Synthetic polynucleotide
atgttcagcttgaaagcattattgccattggccttgttgttggtcagcgccaaccaagttgctgcaaaagtccacaaggctaaaatttataaacacgagttgtccgatgagatgaaagaagtcactttcgagcaacatttagctcatttaggccaaaagtacttgactcaatttgagaaagctaaccccgaagttgttttttctagggagcatcctttcttcactgaaggtggtcacgatgttccattgacaaattacttgaacgcacaatattacactgacattactttgggtactccacctcaaaacttcaaggttattttggatactggttcttccaacctttgggttccaagtaacgaatgtggttccttggcttgtttcttacattctaaatacgatcatgaagcttcttctagctacaaagctaatggtactgaatttgccattcaatatggtactggttctttggaaggttacatttctcaagacactttgtccatcggggatttgaccattccaaaacaagacttcgctgaggctaccagcgagccgggcttaacatttgcatttggcaagttcgatggtattttgggtttgggttacgataccatttctgttgataaggtggtccctccattttacaacgccattcaacaagatttgttggacgaaaagagatttgccttttatttgggagacacttctaaggatactgaaaatggcggtgaagccacctttggtggtattgacgagtctaagttcaagggcgatatcacttggttacctgttcgtcgtaaggcttactgggaagtcaagtttgaaggtatcggtttaggcgacgagtacgccgaattggagagccatggtgccgccatcgatactggtacttctttgattaccttgccatctggattagctgaaatgattaatgctgaaattggggccaagaagggttggaccggtcaatatactttggactgtaacaccagagacaatttacctgatttgattttcaacttcaatggctacaacttcactattgggccatacgattacacgcttgaagtttctggctcctgtatctctgcaattacaccaatggatttcccagaacctgttggcccattggccatcgttggtgatgccttcttgcgtaaatactattctatttacgatttgggcaacaatgcggttggtttggccaaagcaatttga

SEQ ID NO: 11133 - DNA, 2466 bp, Saccharomyces cerevisiae
atggaaaatattacacaacccacacagcaatccacgcaggctactcaaaggtttttgattgagaagttttctcaagaacagatcggcgaaaacattgtgtgcagggtcatttgtaccacgggtcaaattcccatccgagatttgtcagctgatatttcacaagtgcttaaggaaaaacgatccataaagaaagtttggacatttggtagaaacccagcctgtgactatcatttaggaaacatttcaagactgtcaaataagcatttccaaatactactaggagaagacggtaaccttttattgaatgacatttccactaatgggacctggttaaatgggcaaaaagtcgagaagaacagcaatcagttactgtctcaaggtgatgaaataaccgttggtgtaggcgtggaatcagatattttatctctggtcattttcataaacgacaaatttaagcagtgcctcgagcagaacaaagttgatcgcataagatctaacctgaaaaatacctctaaaatagcttctcctggtcttacatcatctactgcatcatcaatggtggccaacaagactggtatttttaaggatttttcgattattgacgaagtggtgggccagggtgcatttgccacagtaaagaaagccattgaaagaactactgggaaaacattcgcggtgaagattataagtaaacgcaaagtaataggcaatatggatggtgtgacaagagagttagaagtattgcaaaagctcaatcatccaaggatagtacgattgaaaggattttatgaagatactgagagttattatatggtgatggagttcgtttctggtggtgacttaatggattttgttgctgctcatggtgcggttggagaagatgctgggagggagatatccaggcagatactcacagcaataaaatacattcactctatgggcatcagccatcgtgacctaaagcccgataatattcttattgaacaagacgatcctgtattggtaaagataaccgactttggtctggcaaaagtacaaggaaatgggtcttttatgaaaaccttctgtggcactttggcatatgtggcacctgaagtcatcagaggtaaagatacatccgtatctcctgatgaatacgaagaaaggaatgagtactcttcgttagtggatatgtggtcaatgggatgtcttgtgtatgttatcctaacgggccacttaccttttagtggtagcacacaggaccaattatataaacagattggaagaggctcatatcatgaagggcccctcaaagatttccggatatctgaagaagcaagagatttcatagattcattgttacaggtggatccaaataataggtcgacagctgcaaaagccttgaatcatccctggatcaagatgagtccattgggctcacaatcatatggtgatttttcacaaatatccttatcacaatcgttgtcgcagcagaaattattagaaaatatggacgatgctcaatacgaatttgtcaaagcgcaaaggaaattacaaatggagcaacaacttcaagaacaggatcaggaagaccaagatggaaaaattcaaggatttaaaatacccgcacacgcccctattcgatatacacagcccaaaagcattgaagcagaaactagagaacaaaaacttttacattccaataatactgagaatgtcaagagctcaaagaaaaagggtaatggtaggtttttaactttaaaaccattgcctgacagcattattcaagaaagcctggagattcagcaaggtgtgaatccatttttcattggtagatccgaggattgcaattgtaaaattgaagacaataggttgtctcgagttcattgcttcattttcaaaaagaggcatgctgtaggcaaaagcatgtatgaatctccggcacaaggtttagatgatatttggtattgccacaccggaactaacgtgagctatttaaataataaccgcatgatacagggtacgaaattccttttacaagacggagatgaaatcaagatcatttgggataaaaacaataaatttgtcattggctttaaagtggaaattaacgatactacaggtctgtttaacgagggattaggtatgttacaagaacaaagagtagtacttaagcaaacagccgaagaaaaagatttggtgaaaaagttaacccagatgatggcagctcaacgtgcaaatcaaccctcggcttcttcttcatcaatgtcggctaagaagccgccagttagcgatacaaataataacggcaataattcggtactaaacgacttggtagagtcaccgattaatgcgaatacggggaacattttgaagagaatacattcggtaagtttatcgcaatcacaaattgatcctagtaagaaggttaaaagggcaaaattggaccaaacctcaaaaggccccgagaatttgcaattttcgtaa

SEQ ID NO: 11134 - DNA, 2466 bp, Artificial Sequence
  Description of Artificial Sequence: Synthetic polynucleotide
atggaaaatattacacaacccacacagcaatccacgcaggctactcaaaggtttttgattgagaagttttctcaagaacagatcggcgaaaacattgtgtgcagggtcatttgtaccacgggtcaaattcccatcagagatttgtctgctgatatttctcaagtgcttaaggaaaaaagatccataaagaaagtttggacatttggtagaaacccagcctgtgactatcatttaggaaacatttctagattatccaataagcatttccaaatattattaggagaagacggtaaccttttattgaatgacatttccactaatgggacctggttaaatgggcaaaaagtcgagaagaacagcaatcagttattatctcaaggtgatgaaataaccgttggtgtaggcgtggaaagtgatattttatctttggtcattttcataaacgacaaatttaagcagtgcctcgagcagaacaaagttgatcgcataagatctaacttgaaaaatacctctaaaatagcttctcctggtcttacatcttctactgcatcttctatggtggccaacaagactggtatttttaaggatttttctattattgacgaagtggtgggccagggtgcatttgccacagtaaagaaagccattgaaagaactactgggaaaacattcgcggtgaagattataagtaaacgcaaagtaataggcaatatggatggtgtgacaagagagttagaagtattgcaaaagctcaatcatccaaggatagtaagattgaaaggattttatgaagatactgagagttattatatggtgatggagttcgtttctggtggtgacttaatggattttgttgctgctcatggtgcggttggagaagatgctgggagggagatatccaggcagatactcacagcaataaaatacattcactctatgggcatcagccatcgtgacttgaagcccgataatattcttattgaacaagacgatcctgtattggtaaagataaccgactttggtttggcaaaagtacaaggaaatgggtcttttatgaaaaccttctgtggcactttggcatatgtggcacctgaagtcatcagaggtaaagatacatccgtatctcctgatgaatacgaagaaaggaatgagtactcttctttagtggatatgtggtctatgggatgtcttgtgtatgttatcttaacgggccacttaccttttagtggtagcacacaggaccaattatataaacagattggaagaggctcctatcatgaagggcccctcaaagatttcagaatatctgaagaagcaagagatttcatagattctttgttacaggtggatccaaataataggtctacagctgcaaaagccttgaatcatccctggatcaagatgagtccattgggctctcaaagttatggtgatttttctcaaatatccttatctcaatctttgtctcagcagaaattattagaaaatatggacgatgctcaatacgaatttgtcaaagcgcaaaggaaattacaaatggagcaacaacttcaagaacaggatcaggaagaccaagatggaaaaattcaaggatttaaaatacccgcacacgcccctattcgttatacacagcccaaaagcattgaagcagaaactagagaacaaaaacttttacattccaataatactgagaatgtcaagagctctaagaaaaagggtaatggtaggtttttaactttaaaaccattgcctgacagcattattcaagaaagcttagagattcagcaaggtgtgaatccatttttcattggtagatccgaggattgcaattgtaaaattgaagacaataggttgtctagagttcattgcttcattttcaaaaagaggcatgctgtaggcaaaagcatgtatgaatctccggcacaaggtttagatgatatttggtattgccacaccggaactaacgtgagctatttaaataataaccgcatgatacagggtacgaaattccttttacaagacggagatgaaatcaagatcatttgggataaaaacaataaatttgtcattggctttaaagtggaaattaacgatactacaggtttatttaacgagggattaggtatgttacaagaacaaagagtagtacttaagcaaacagccgaagaaaaagatttggtgaaaaagttaacccagatgatggcagctcaacgtgcaaatcaaccctctgcttcttcttcttctatgtctgctaagaagccgccagttagcgatacaaataataacggcaataattctgtattgaacgacttggtagagtctccgattaatgcgaatacggggaacattttgaagagaatacattctgtaagtttatctcaatctcaaattgatcctagtaagaaggttaaaagggcaaaattggaccaaacctccaaaggccccgagaatttgcaatttagttga

SEQ ID NO: 11135 - DNA, 99 bp, Saccharomyces cerevisiae
atgatggttcacctcacgctgaaatctcatctaataaaggaagaattactttggcatgctttatctccgtcctatagttgccgataccacggtagataa

SEQ ID NO: 11136 - DNA, 99 bp, Artificial Sequence
  Description of Artificial Sequence: Synthetic oligonucleotide
atgatggttcacctcacgttgaaatctcatttgataaaggaagaattactttggcatgctttatctccgtcctatagttgcaggtaccacggtagatga

SEQ ID NO: 11137 - DNA, 1077 bp, Saccharomyces cerevisiae
atgttgccagaaaagagactattgactccagacgatatgaaactatgggaagaatccccaacaagagctcatttcactaaatttattatagatttggctgaatctgtcaaaggacatgagaattcccagtacaaagaaccaatatcggagtcaataaacagtatgatgaacttgctttcgcaaataaaagatatcactcagaagcacccagtaataaaggatgcagatagctcgagatttggtaaggttgagtttagggacttttatgacgaagtttcacggaattccaggaagatcttacgttccgaatttccctctctcacagatgagcagttggaacaattatcgatttatctagatgaatcatggggaaataaaagaagaattgattatggttcaggtcatgaattaaatttcatgtgtttactttatggactctatagttatggaatattcaatctttcaaacgattcaactaacctcgtgctgaaagtttttatagaataccttaaaataatgaggatactagaaactaaatattggcttgagcctgcgggctctcatggtgtttggggattagatgattatcatttccttccatttctatttggtgccttccaattaaccacccacaagcacttaaagccgatatcaattcacaataatgagctcgtagaaatgttcgctcatcggtacttatattttggttgtatcgcttttattaataaggtcaagtcatccgcctccttgagatggcattctcctatgctagatgacatcagcggtgtaaagacttggtcaaaagttgctgaagggatgataaaaatgtataaagccgaagtccttagtaaattgcccatcatgcaacatttttactttagcgagtttttgccttgtccggatggtgtatctccaccaagaggccacatacatgatgggactgataaggatgatgagtgcaattttgaaggacatgttcatactacttggggagactgctgtggtataaagttaccgagcgctattgcggctactgagatgaataaaaaacatcataaaccaataccttttgattag

SEQ ID NO: 11138 - DNA, 1077 bp, Artificial Sequence
  Description of Artificial Sequence: Synthetic polynucleotide
atgttgccagaaaagagattattgactccagacgatatgaaattatgggaagaatccccaacaagagctcatttcactaaatttattatagatttggctgaatctgtcaaaggacatgagaattcccagtacaaagaaccaatatctgagagtataaacagtatgatgaacttgctttctcaaataaaagatatcactcagaagcacccagtaataaaggatgcagatagcagcagatttggtaaggttgagtttagggacttttatgacgaagtttctagaaattccaggaagatcttacgttccgaatttccctctctcacagatgagcagttggaacaattatccatttatttggatgaaagttggggaaataaaagaagaattgattatggttctggtcatgaattaaatttcatgtgtttactttatggactctatagttatggaatattcaatctttccaacgattctactaacctcgtgttgaaagtttttatagaataccttaaaataatgaggatattggaaactaaatattggcttgagcctgcgggctctcatggtgtttggggattagatgattatcatttccttccatttttgtttggtgccttccaattaaccacccacaagcacttaaagccgatatctattcacaataatgagctcgtagaaatgttcgctcatcgttacttatattttggttgtatcgcttttattaataaggtcaagtcttccgcctccttgagatggcattctcctatgcttgatgacatcagcggtgtaaagacttggtccaaagttgctgaagggatgataaaaatgtataaagccgaagtccttagtaaattgcccatcatgcaacatttttactttagcgagtttttgccttgtccggatggtgtatctccaccaagaggccacatacatgatgggactgataaggatgatgagtgcaattttgaaggacatgttcatactacttggggagactgctgtggtataaagttaccgagcgctattgcggctactgagatgaataaaaaacatcataaaccaataccttttgattga

SEQ ID NO: 11139 - DNA, 1356 bp, Saccharomyces cerevisiae
atggacggaaatgatcacaaagtcgaaaatttaggagatgtagacaaattttattccagaatacgctggaataaccaattttcatatatggccactctgccgccccacctacaaagcgaaatggaaggtcagaaatcattgctaatgcgatatgatacttataggaaggaaagttcttcttttagtggtgaaggcaagaaagttactctgcagcatgttcctacagatttttcagaagcatcacaagcagtgattagcaagaaagatcacgatacgcatgcatctgcttttgtgaataaaattttccaaccagaggttgctgaagaacttatagttaatcgatacgaaaaacttctgtcacaaaggccggaatggcatgcaccctggaaactttcacgcgttatcaatggccatcttggatgggtacgatgcgttgcaatcgatcctgttgacaacgaatggttcatcaccggaagtaatgatacgacaatgaaagtttgggatcttgcaacaggaaaattaaaaactaccttagcagggcatgtaatgacagtgagagacgttgctgtgtcagatcgacatccttatttattttctgttagtgaagataagacggtcaaatgctgggacctagagaaaaaccaaattattagagattactatggacatttatcgggggttcgtacggtgagcatacatccaacgctggatctcatagctaccgcaggccgagatagcgttatcaaactctgggatatgagaaccagaatacctgttattacactagttgggcataagggtccaatcaatcaagtacagtgtactccagtagaccctcaagtggtgagttcatcgactgatgctacggtaaggttatgggatgtagttgctgggaaaacaatgaaagttctaacacatcataagaggtctgtgagagctacagcgttgcatcctaaggagttttcggtggcttctgcgtgtactgatgacatcagatcatggggattagcagaggggtctttactcaccaattttgagtctgaaaagacaggcataatcaatactttaagcattaatcaagatgatgtattattcgctggcggtgacaatggtgtgctttccttttatgattataagtctggtcacaaataccaatcgttggccacgagagaaatggtaggctctctggaaggtgaacggagtgttctttgtagcactttcgataaaacaggtttaagattaatcactggagaagcagacaaaagcataaagatttggaaacaggatgagacggctacaaaagagtcagaaccggggctagcgtggaaccccaacttaagcgccaaaagattttag

SEQ ID NO: 11140 - DNA, 1356 bp, Artificial Sequence
  Description of Artificial Sequence: Synthetic polynucleotide
atggacggaaatgatcacaaagtcgaaaatttaggagatgtagacaaattttattccagaatacgctggaataaccaattttcttatatggccactttaccgccccacttgcaaagcgaaatggaaggtcagaaatctttgttgatgagatatgatacttataggaaggaaagttcttcttttagtggtgaaggcaagaaagttactttacagcatgttcctacagatttttctgaagcatctcaagcagtgattagcaagaaagatcacgatacgcatgcatctgcttttgtgaataaaattttccaaccagaggttgctgaagaacttatagttaatagatacgaaaaacttttatctcaaaggccggaatggcatgcaccctggaaactttcccgcgttatcaatggccatcttggatgggtaagatgcgttgcaatcgatcctgttgacaacgaatggttcatcaccggaagtaatgatacgacaatgaaagtttgggatcttgcaacaggaaaattaaaaactaccttagcagggcatgtaatgacagtgagagacgttgctgtgtctgatagacatccttatttattttctgttagtgaagataagacggtcaaatgctgggacttggagaaaaaccaaattattagagattactatggacatttaagtggggttcgtacggtgagcatacatccaacgttagatctcatagctaccgcaggcagagatagcgttatcaaactctgggatatgagaaccagaatacctgttattacattagttgggcataagggtccaatcaatcaagtacagtgtactccagtagaccctcaagtggtgagttcttctactgatgctacggtaaggttatgggatgtagttgctgggaaaacaatgaaagttttgacacatcataagaggtctgtgagagctacagcgttgcatcctaaggagttttctgtggcttctgcgtgtactgatgacatcagaagttggggattagcagaggggtctttactcaccaattttgagtctgaaaagacaggcataatcaatactttaagcattaatcaagatgatgtattattcgctggcggtgacaatggtgtgctttccttttatgattataagtctggtcacaaataccaatctttggccacgagagaaatggtaggctctttggaaggtgaaagaagtgttctttgtagcactttcgataaaacaggtttaagattaatcactggagaagcagacaaaagcataaagatttggaaacaggatgagacggctacaaaagagagtgaaccggggttggcgtggaaccccaacttaagcgccaaaagattttga

SEQ ID NO: 11141 - DNA, 2706 bp, Saccharomyces cerevisiae
atggttaatcctgttggatcctcgaaattggaacaaaacaatataaaaagcattataggatcatcgtacaatcgactatacagccaatttacttctgatgagttgacagaagtgggaaactacaagattttaaaacaaataggtgaaggaagttttggaaaagtatatttagcgctccatagaccaacacatcgtaaagtctgcctaaagacgagtgataagaatgatcccaatatcgttagagaggtattttaccatagacagttcgattttccttatattacaaagctttatgaagtgatagtgacagaatcaaaagtgtggatggcattagaatattgcccagggaaggaattatatgaccacttactttctctgcgtagaatatcgttattggaatgcggagagttgtttgcacaaatttcaggtgctgtttactatgcacactcaatgcattgtgttcatagagatttgaagttagagaatattttattagacaaaaatggaaatgcaaaattgacggattttggttttacgagagaatgtatgacaaagacgacattagaaacggtttgcggtaccacagtttatatggcacctgaattgatagaaagaaggacttatgatggattcaagattgatatatggtcattgggagtgatactatacacattaattacgggatatttgccatttgatgatgacgatgaggctaaaacgaaatggaaaatcgtcaatgaagaaccgaaatacgatgctaaagttattccggacgatgctagggatttgatctcacgattattggctaaaaatccgggagagcgcccatcgttgtcacaagttttacgccacccttttttacagccttacggttcagtggttttagatcagactcagaaaattttgtgcagacagcgcagtggagggactcagtttaaaagtaaattagaaaggcgattgctgaagcgtcttaaacaatcaggggttgatacgcaagcaataaaacaatcaattttgaaaaaaaagtgcgattcactctcgggtctatggttattgttgttagcccaagggaaaaagcaagaaaattgcaaatatccaaaaagaagcaggtccgttttatcagtcaaaaaagttattgaaagtgctacgcataacgacactaatggcattagcgaagatgttttgaaaccctcacttgaactttctagagctgcttcattgagtaaaatgctcaataaaggctcagattttgtaacatcgatgactccggttagcagaaagaagtctaaagattcagcaaaagttctgaatcctactctctctaaaatatcctcacaaagggcttatagtcactctattgcaggttctcctcgcaagtccaataatttcttacaaaaagtttctagttttttcaagtcaaaaaaaagctctaacagcaatagcaacaatagtattcacacaaatgttagtgaaagcttgattgcaagcaatagaggagccccatcttcagggtcgtttctcaaaaaaaacagtggttctattcagaaatcaagaactgacactgttgcaaatccttcaaggacggagtctataggatcgttaaacgaaaatgttgccggtgccattgtgccacggagtgctaataatactacattagaaaataagaaaacttctgggaatgaaataggcttaaaagtagctccagaactattattaaatgaacatatccgaatagaggaacctcgcctcaagcgcttcaaatcgtccatatcaagtgaaatatctcaaacttctactggtaattatgatagcgaatctgcggaaaattctaggtctatatcttttgatggaaaagtttccccgccaccgatacgaaatcggccattgtcagagatatcgcaaatttctaatgacacttatatatcagagtactccactgatggtaataattcgtcattcaaaatttcagacactatcaagccgagctatatacgaaaaggctctgaaactacctcgcagtattcagcttcatccgaaaaaatgacaaatggctacggtagaaaatttgtcaggagggatttaagcattgtatcgactgcgtcgagcacctctgaaagaagttcaagaacagattccttttacgatatcactacagctacaccagttgtgaccactgataataggcgcaataaaaacaataatctgaaagagtctgttttgcccagatttgggactcaaaggccatggactggcaaaaggacgtataccacgtcccgccatggcaagaatgctaggcgttcgtctaaaagaggtctgttcaaaataacttcttcaaatacagactctattattcaagaagtaagctcatcagaagaagaagatcataatgttatctatagcaagggaaagggtcttccaacaccagttttgcaaactaaaggattaatagaaaatgggttgaacgaacgcgatgaagaaggagatgacgagtatgcaattcacactgacggagaattttctatcaaaccgcagttttccgatgacgttatcgacaaacagaatcatttgcccagcgtgaaggctgtggcaactaaacgttcgttgagcgaaggaagtaattggtctagtagctatttggattcggacaataatcggcgaagggtatcttcattgctagtagaggatggggggaatcctacagcgtag

SEQ ID NO: 11142 - DNA, 2706 bp, Artificial Sequence
  Description of Artificial Sequence: Synthetic polynucleotide
atggttaatcctgttggatcctctaaattggaacaaaacaatataaaaagcattataggatcttcctacaatagattatacagccaatttacttctgatgagttgacagaagtgggaaactacaagattttaaaacaaataggtgaaggaagttttggaaaagtatatttagcgctccatagaccaacacatcgtaaagtctgcttgaagacgagtgataagaatgatcccaatatcgttagagaggtattttaccatagacagttcgattttccttatattacaaagctttatgaagtgatagtgacagaaagtaaagtgtggatggcattagaatattgcccagggaaggaattatatgaccacttactttctttacgtagaatatctttattggaatgcggagagttgtttgcacaaatttctggtgctgtttactatgcacactccatgcattgtgttcatagagatttgaagttagagaatattttattagacaaaaatggaaatgcaaaattgacggattttggttttacgagagaatgtatgacaaagacgacattagaaacggtttgcggtaccacagtttatatggcacctgaattgatagaaagaaggacttatgatggattcaagattgatatatggtctttgggagtgatattatacacattaattacgggatatttgccatttgatgatgacgatgaggctaaaacgaaatggaaaatcgtcaatgaagaaccgaaatacgatgctaaagttattccggacgatgctagggatttgatcagtaggttattggctaaaaatccgggagagcgcccatctttgtctcaagttttacgccacccttttttacagccttacggttctgtggttttagatcagactcagaaaattttgtgcagacagcgcagtggagggactcagtttaaaagtaaattagaaaggagattgttgaagcgtcttaaacaaagtggggttgatacgcaagcaataaaacaatctattttgaaaaaaaagtgcgattctctctctggtttatggttattgttgttagcccaagggaaaaagcaagaaaattgcaaatatccaaaaagaagcaggtccgttttaagtgtcaaaaaagttattgaaagtgctacgcataacgacactaatggcattagcgaagatgttttgaaaccctcccttgaactttctagagctgcttctttgagtaaaatgctcaataaaggcagtgattttgtaacatctatgactccggttagcagaaagaagtctaaagattctgcaaaagttttgaatcctactctctctaaaatatcctctcaaagggcttatagtcactctattgcaggttctcctcgcaagtccaataatttcttacaaaaagtttctagttttttcaagagtaaaaaaagctctaacagcaatagcaacaatagtattcacacaaatgttagtgaaagcttgattgcaagcaatagaggagccccatcttctgggtcttttctcaaaaaaaacagtggttctattcagaaatctagaactgacactgttgcaaatccttctaggacggagtctataggatctttaaacgaaaatgttgccggtgccattgtgccaagaagtgctaataatactacattagaaaataagaaaacttctgggaatgaaataggcttaaaagtagctccagaattattattaaatgaacatatcagaatagaggaacctcgcctcaagcgcttcaaatcttccatatctagtgaaatatctcaaacttctactggtaattatgatagcgaatctgcggaaaattctaggtctatatcttttgatggaaaagtttccccgccaccgataagaaatagaccattgagtgagatatctcaaatttctaatgacacttatatatctgagtactccactgatggtaataattcttctttcaaaatttctgacactatcaagccgagctatataagaaaaggctctgaaactacctctcagtattctgcttcttccgaaaaaatgacaaatggctacggtagaaaatttgtcaggagggatttaagcattgtatccactgcgtccagcacctctgaaagaagtagtagaacagattccttttacgatatcactacagctacaccagttgtgaccactgataataggcgcaataaaaacaataatttgaaagagtctgttttgcccagatttgggactcaaaggccatggactggcaaaaggacgtataccacgtcccgccatggcaagaatgctaggcgttcttctaaaagaggtcttttcaaaataacttcttccaatacagactctattattcaagaagtaagctcttctgaagaagaagatcataatgttatctatagcaagggaaagggtcttccaacaccagttttgcaaactaaaggattaatagaaaatgggttgaacgaacgcgatgaagaaggagatgacgagtatgcaattcacactgacggagaattttctatcaaaccgcagttttccgatgacgttatcgacaaacagaatcatttgcccagcgtgaaggctgtggcaactaaacgttctttgagcgaaggaagtaattggtctagtagctatttggattctgacaataatagaagaagggtatcttctttgttagtagaggatggggggaatcctacagcgtga

SEQ ID NO: 11143 - DNA, 885 bp, Saccharomyces cerevisiae
atgaatgacattaaacaattactttggaatggtgagcttaatgtgctggtatcgatcgatccttcatttttgatgaaaggaagtccaagagaaattgcggtgctacgaataagggtaccaagggaaacatatttagtcaattatatgcccctcatttggaacaagattaaaagctttctttcttttgacccattgaccgacagtgagaagtatttctggtttgagcataataagacgcctattccgtggaattacccagtaggtgttttgtttgactgcctagccggaaaaagcgctacttttaccacctcttttgagaaccaggtaaaggatgttctcacttttttgagaattcacttggttatgggcgattcgttgccaccaactatcattcccatcgcatctagcaaaacgcaagcggaaaagttttggtttcaccaatggaaacaagtttgcttcatactgaatggttcctcaaaagctattatgtctttatcggtcaacgaagctcgaaaattttggggcagtgttattacgagaaatttccaagatttcattgaaatatctaacaagataagttcatcaagaccgcgacatataccgctcatcattcaaacctcaaggacatcaggaacttttcgaatatcacaaccaactatcagtatgactggagtcaatcctacgttgaaggatattgaaggcgatattctggacgtaaaggaaggaatcaatggtaatgatgtcatggttatttgtcaaggaattgaaattccttggcatatgctcctgtatgatttgtattctaaattgcgaagttttgatggctttttgtacataactcttgttcctataaaaggcggcgataaagcttcctctgagctctaa

SEQ ID NO: 11144 - DNA, 885 bp, Artificial Sequence
  Description of Artificial Sequence: Synthetic polynucleotide
atgaatgacattaaacaattactttggaatggtgagcttaatgtgttagtatctatcgatccttcttttttgatgaaaggaagtccaagagaaattgcggtgttgagaataagggtaccaagggaaacatatttagtcaattatatgcccctcatttggaacaagattaaaagctttctttcttttgacccattgaccgacagtgagaagtatttctggtttgagcataataagacgcctattccgtggaattacccagtaggtgttttgtttgactgcttagccggaaaaagcgctacttttaccacctcttttgagaaccaggtaaaggatgttctcacttttttgagaattcacttggttatgggcgattctttgccaccaactatcattcccatcgcatctagcaaaacgcaagcggaaaagttttggtttcaccaatggaaacaagtttgcttcatattgaatggttcctctaaagctattatgtctttaagtgtcaacgaagctagaaaattttggggcagtgttattacgagaaatttccaagatttcattgaaatatctaacaagataagttcttctagaccgcgccatataccgctcatcattcaaacctctaggacatctggaacttttagaatatctcaaccaactatcagtatgactggagtcaatcctacgttgaaggatattgaaggcgatattttggacgtaaaggaaggaatcaatggtaatgatgtcatggttatttgtcaaggaattgaaattccttggcatatgctcttatatgatttgtattctaaattgagaagttttgatggctttttgtacataactcttgttcctataaaaggcggcgataaagcttcctctgagctctga

SEQ ID NO: 11145 - DNA, 522 bp, Saccharomyces cerevisiae
atgagttttgcatcgaggaatattggacgtaagatagcaggagtgggagttgacattgtatacttgccaagatttgcacatatactagagaaatattccccattcgacccatgtggccgttctaccttgaataaaataacacggaagttcatgcatgaaaaggaaagatttcatttcagtaatcttctcatcgaagaaaactgcttaactccacgattgcatgaatatatagcgggagtttgggctttgaaggaatgctcattgaaagcgttgtgttgctgtgtttcaaagcatgatctacctcctgcccaagtactgtacgctggaatgctatataaaacacaaaccgatacaggtgtacctcagttagagtttgataagatgtttggaaaaaagtatccaaagtatcaacagctctcgaaaaactacgattctctcttttccactcatgagtttttagtttcgctatcccatgataaagattatttaattgcagtaacaaacttggtagaaagagagtaa

SEQ ID NO: 11146 - DNA, 522 bp, Artificial Sequence
  Description of Artificial Sequence: Synthetic polynucleotide
atgagttttgcaagcaggaatattggacgtaagatagcaggagtgggagttgacattgtatacttgccaagatttgcacatatattggagaaatattccccattcgacccatgtggccgttctaccttgaataaaataacaagaaagttcatgcatgaaaaggaaagatttcatttcagtaatcttctcatcgaagaaaactgcttaactccaagattgcatgaatatatagcgggagtttgggctttgaaggaatgctctttgaaagcgttgtgttgctgtgtttccaagcatgatttacctcctgcccaagtattgtacgctggaatgctttataaaacacaaaccgatacaggtgtacctcagttagagtttgataagatgtttggaaaaaagtatccaaagtatcaacagctctctaaaaactacgattctctcttttccactcatgagtttttagtttctttatcccatgataaagattatttaattgcagtaacaaacttggtagaaagagagtga

SEQ ID NO: 11147 - DNA, 2613 bp, Saccharomyces cerevisiae
atgtcaacaacattagcagcaccagcgaaactaaagagtttgctcctgaatctacatactcactgtattgggctacacgttaacgatgtcacacctaaagtatatttcaagttattgatacggcatcttctacagatatctagatcaaacgctgctcatcctaagctaagaagaagggcccagattttattggtatcgcttttcctatctggtgtcacacttttttctggtgtaacatatagtactttcaaaattattctaaaatgttataaattttacaagtttccatggaagagaaggaataggagacctttaataagaagaacaagatctcaaatgcaattagacagtggtgcaagaataatgtatattcctgaagtggaattagtcgaccgccagagtcccgatgacaacaaatttatgaatgctacagataaaaaaaaaaggaaaaggatatttattccaccaaaggataacgatgtatatgaacacgataagtttctttttaaaaatgtagaactggaaagagccaagaattcgcagttattctactcaaaatttttaaaccaaatgaacgtcttgtctaaaattttaattccaacagtttttgacaaaaactttcttcttttaactgctcaaatttttttcctggtgatgagaacttggctctctttgtttgtagccaagctggatggacaaatagtcaaaaatataattgctggtagaggaagaagctttctgtgggacttagggtgttggtttttaattgctgtccctgcttcttatactaatagtgctattaagctacttcaaaggaagttgagtttaaactttagggtaaatttgacacgttacatccatgacatgtatttggataaaagactaacattttacaaattaatttttgatgcaaaggcgtccaattcggtaatcaagaatatcgacaactccattactaatgatgttgcaaaattttgcgatgcgacatgctccgtttttgcaaacattgcaaagccagttattgatttaatattcttttcggtttatttacgtgataatttgggaactgtgggagtagcaggtatatttgttaattatttcattactgggtttattttgaggaaatacacgccaccattaggtaaattggcaggcgagagatctgcttcagacggcgattactacaattatcatctaaacatgataaataatagcgaagagatcgcattttaccaaggaacagcagtggaaaggacgaaagttaaagagttgtatgatgtgctgatggaaaaaatgctgctggttgataaagtcaagtttggttacaatatgttggaagactatgttttaaaatatacatggtccggtttgggttatgtttttgcctcaatccctatcgttatgtctaccttagcgacaggcatcaattcagaggaaaaaaatatgaaggaatttatagtcaacaaaaggttgatgttgtcgcttgcagatgcaggctcgagattgatgcattcgataaaggacatctcacaattgaccggctacactaataggatatttactctgctttccgtcttacacagggttcactctctgaactttaattacggcgctgttccttcaatcctgtcaatacgtacagaagacgcttccagaaattccaacttattacccaccacggataattcgcaagatgctattcgtggtactattcaacgcaattttaacggtattcggttagaaaatatagacgtaatcattccatcagtaagggcgagcgaaggcataaagctgattaacaagcttacatttcaaattcctttgcatattgacccaataacttcaaagtccaattctatacaagacttatcgaaggcaaatgatataaagttaccatttttgcagggttctggctccagcctgttaatattagggccaaatggttgcggtaaaagttcaattcaacgcattatagctgaaatatggccagtgtataacaaaaatggattattgtcgattccttcagaaaataatattttttttattcctcagaaaccatattttagtagaggtggaactttaagagaccaaattatataccccatgtcctcggatgaattctttgatagggggtttagagataaggagctagtacagatattagtcgaagtgaaactagattatcttttaaaaagaggcgttggcttaacttacctagatgccattgccgattggaaggacttattaagtggtggtgaaaagcaaagagtaaattttgctagaatcatgtttcataaaccactatacgtagtattagatgaggctacaaacgcaattagtgttgacatggaagactatctgttcaatcttttaaaacgatacagattcaatttcatttccatatcacaaagacccacattaatcaaatatcatgaaatgttactagagatcggtgaaaatcgagatggcaaatggcaattacaggcagttggtaccgatgaagcaatcacgtcgattgacaacgagattgaggaattggagagaaaactagaaagagtaaaaggttgggaagatgagaggacgaagctacgggaaaagcttgaaattatttga

SEQ ID NO: 11148 - DNA, 2613 bp, Artificial Sequence
  Description of Artificial Sequence: Synthetic polynucleotide
atgtctacaacattagcagcaccagcgaaattgaagagtttgctcttgaatttacatactcactgtattgggttgcacgttaacgatgtcacacctaaagtatatttcaagttattgataagacatcttttacagatatctagatctaacgctgctcatcctaagttgagaagaagggcccagattttattggtatctcttttcttatctggtgtcacacttttttctggtgtaacatatagtactttcaaaattattttgaaatgttataaattttacaagtttccatggaagagaaggaataggagacctttaataagaagaacaagatctcaaatgcaattagacagtggtgcaagaataatgtatattcctgaagtggaattagtcgaccgccagagtcccgatgacaacaaatttatgaatgctacagataaaaaaaaaaggaaaaggatatttattccaccaaaggataacgatgtatatgaacacgataagtttctttttaaaaatgtagaattggaaagagccaagaattctcagttattctactctaaatttttaaaccaaatgaacgtcttgtctaaaattttaattccaacagtttttgacaaaaactttcttcttttaactgctcaaatttttttcttggtgatgagaacttggctctctttgtttgtagccaagttggatggacaaatagtcaaaaatataattgctggtagaggaagaagctttttatgggacttagggtgttggtttttaattgctgtccctgcttcttatactaatagtgctattaagcttcttcaaaggaagttgagtttaaactttagggtaaatttgacacgttacatccatgacatgtatttggataaaagattgacattttacaaattaatttttgatgcaaaggcgtccaattctgtaatcaagaatatcgacaactccattactaatgatgttgcaaaattttgcgatgcgacatgctccgtttttgcaaacattgcaaagccagttattgatttaatattcttttctgtttatttacgtgataatttgggaactgtgggagtagcaggtatatttgttaattatttcattactgggtttattttgaggaaatacacgccaccattaggtaaattggcaggcgagagatctgcttctgacggcgattactacaattatcatttgaacatgataaataatagcgaagagatcgcattttaccaaggaacagcagtggaaaggacgaaagttaaagagttgtatgatgtgttgatggaaaaaatgttattggttgataaagtcaagtttggttacaatatgttggaagactatgttttaaaatatacatggtccggtttgggttatgtttttgccagcatccctatcgttatgtctaccttagcgacaggcatcaattctgaggaaaaaaatatgaaggaatttatagtcaacaaaaggttgatgttgtctcttgcagatgcaggctccagattgatgcattccataaaggacatctctcaattgaccggctacactaataggatatttactttactttccgtcttacacagggttcactctttgaactttaattacggcgctgttccttccatcttatctatacgtacagaagacgcttccagaaattccaacttattacccaccacggataattctcaagatgctattcgtggtactattcaacgcaattttaacggtattagattagaaaatatagacgtaatcattccatctgtaagggcgagcgaaggcataaagttgattaacaagcttacatttcaaattcctttgcatattgacccaataacttctaagtccaattctatacaagacttatccaaggcaaatgatataaagttaccatttttgcagggttctggctccagcttattaatattagggccaaatggttgcggtaaaagttctattcaacgcattatagctgaaatatggccagtgtataacaaaaatggattattgtctattccttctgaaaataatattttttttattcctcagaaaccatattttagtagaggtggaactttaagagaccaaattatataccccatgtccagtgatgaattctttgatagggggtttagagataaggagttggtacagatattagtcgaagtgaaattggattatcttttaaaaagaggcgttggcttaacttacttggatgccattgccgattggaaggacttattaagtggtggtgaaaagcaaagagtaaattttgctagaatcatgtttcataaaccattgtacgtagtattagatgaggctacaaacgcaattagtgttgacatggaagactatcttttcaatcttttaaaaagatacagattcaatttcatttccatatctcaaagacccacattaatcaaatatcatgaaatgttattggagatcggtgaaaatagagatggcaaatggcaattacaggcagttggtaccgatgaagcaatcacgtccattgacaacgagattgaggaattggagagaaaattagaaagagtaaaaggttgggaagatgagaggacgaagttgagagaaaagcttgaaattatttga

SEQ ID NO: 11149 - DNA, 1368 bp, Saccharomyces cerevisiae
atggctccaactaatctaaccaagaaaccatctcaatacaaacagtcttcaagaaagggtaagaaagcatggagaaaaaatatcgatttatctgacgtagaacaatatatggaaaagaaaattgatcatgaaattacgcatggtaccagtgatataacctctttgcaaaatgatgctctttttcatgttgatgttgagggtgatgagatattgaaaaataaattaattaaaaggaaacaaattaagaaggttctaaaaagtaaagagattttagacgccgttaaaacgaattcaaaaattgcagcactaaatcaccataagaatagtagtggaaatcctaataagattcaaggtgtttctaaacacgaattaaagaaattaatggctttggctggcagagtacacggcgaatcgaagatcaagaatagagttgccaaagacggtctagttaaaacaacggctggcgacttatggggtgaagaatccaattcaaagaaacagaaggtcaaattaccttccggtatcaaacttgatgtggaaaaaaaggaccagatacctgaagaactattgaaaaaatccacgacaagttggtctactgcttcagtcagaccaagtactttagatatagagccaattgcagtaaaagaattcacagaaattccacatgctggtaaatcctacaatcccaacaataaagcttggtcagaattgataaacaaagagtataaagaggaaaaggcaagagaagatgaaagaatcgccttggaaaagtacaaagaaagaattagacatttaatggaaactttagatgacaatgaagaggaagagtcttcatcaaacgaagaagaagaagaagaagaagaagaaaatgaaaatgaaaatgaaagtacgcaatgtagtggatctgataaggaaataaaactatcaataaataagcctgtgaagaataaaaagaaaacaaaatatcaaagaaacaaggcaaagagacatgaagagaaagtaaaattgcaacaagagttgaaagaattgagacaacgtgttaaagatttagaagaagttatcaattctgaagagactgagatactttcagccatagagtcagatagcaacaaggttaaaaaaagcaagaaaaataagaaacacaagttagggacgaaatactctgtgattgatgaaagattggagattaaattttctgacgaattatctgactcattgagaaaactgaaacctgaaggaaatctgctatatgatactgtgagaaaactacaaagttctggtaaggtcgaaacaagagtgcccgttaggaaaggtagaaagtataagcagaaaatcactgaaaagtggacacataaggacttcaaatag

SEQ ID NO: 11150 - DNA, 1368 bp, Artificial Sequence
  Description of Artificial Sequence: Synthetic polynucleotide
atggctccaactaatttgaccaagaaaccatctcaatacaaacagtcttctagaaagggtaagaaagcatggagaaaaaatatcgatttatctgacgtagaacaatatatggaaaagaaaattgatcatgaaattacgcatggtaccagtgatataacctctttgcaaaatgatgctctttttcatgttgatgttgagggtgatgagatattgaaaaataaattaattaaaaggaaacaaattaagaaggttttgaaaagtaaagagattttagacgccgttaaaacgaattctaaaattgcagcattgaatcaccataagaatagtagtggaaatcctaataagattcaaggtgtttctaaacacgaattaaagaaattaatggctttggctggcagagtacacggcgaatccaagatcaagaatagagttgccaaagacggtttagttaaaacaacggctggcgacttatggggtgaagaatccaattctaagaaacagaaggtcaaattaccttccggtatcaaacttgatgtggaaaaaaaggaccagatacctgaagaattattgaaaaaatccacgacaagttggtctactgcttctgtcagaccaagtactttagatatagagccaattgcagtaaaagaattcacagaaattccacatgctggtaaatcctacaatcccaacaataaagcttggtctgaattgataaacaaagagtataaagaggaaaaggcaagagaagatgaaagaatcgccttggaaaagtacaaagaaagaattagacatttaatggaaactttagatgacaatgaagaggaagagtcttcttccaacgaagaagaagaagaagaagaagaagaaaatgaaaatgaaaatgaaagtacgcaatgtagtggatctgataaggaaataaaattatctataaataagcctgtgaagaataaaaagaaaacaaaatatcaaagaaacaaggcaaagagacatgaagagaaagtaaaattgcaacaagagttgaaagaattgagacaacgtgttaaagatttagaagaagttatcaattctgaagagactgagatactttctgccatagagtctgatagcaacaaggttaaaaaaagcaagaaaaataagaaacacaagttagggacgaaatactctgtgattgatgaaagattggagattaaattttctgacgaattatctgactctttgagaaaattgaaacctgaaggaaatttattatatgatactgtgagaaaattacaaagttctggtaaggtcgaaacaagagtgcccgttaggaaaggtagaaagtataagcagaaaatcactgaaaagtggacacataaggacttcaaatga

SEQ ID NO: 11151 - DNA, 1305 bp, Saccharomyces cerevisiae
atgtctcaatacgcaagctcatcctcatggacttctttcttgaagtcaatcgcttcattcaatggtgatctttcttcgttatcggctcctccattcattttatctccaatctcattgaccgagttttctcagtactgggctgaacatccagagctattcttggaaccctcttttatcaatgacgataattacaaagaacactgtttaattgaccctgaagtcgagtcacccgaattggcccgtatgctggccgttactaaatggttcatttccactttaaaatctcaatactgttctcgtaatgaatccttaggttctgagaaaaaacctttgaacccatttctaggtgagttgttcgttggtaaatgggaaaataaagagcatcctgaatttggagaaacggttttgttaagtgagcaagtttctcaccatccacccgtcactgctttttccatcttcaatgataagaacaaggttaagctgcaaggctacaaccaaattaaagccagtttcactaaatccttaatgctgactgttaaacaatttggtcacactatgttggatattaaggatgagagttatttggttaccccacctccattgcatattgaaggtattcttgtcgcttctccctttgttgaattggaaggaaaatcatatatccaatcttcgacaggtctactttgtgttattgaattttcaggtagaggctacttttctggtaaaaagaattcattcaaggcaagaatttacaaagactctaaagatagcaaggacaaggaaaaggcattatacacaatatcaggccaatggtctggctcttctaaaataatcaaggcaaataagaaagaagaatcacgattattttacgatgctgctagaatccctgctgaacatctgaatgtcaagcctttggaggagcaacacccactggaaagtagaaaagcctggtacgacgtggctggtgccatcaaattaggcgattttaacttaattgccaaaacgaaaactgaattggaagaaacgcaaagagaattgagaaaagaggaagaagctaaaggcattagctggcaaagaagatggttcaaagattttgactactctgtcacgcccgaagaaggcgcccttgtacctgaaaaggatgacactttcttaaaactcgcctctgctctaaatttatcaacgaagaatgctccaagtggtactttggtgggtgacaaagaagacaggaaggaggatctttcatccattcattggagattccaaagagagttgtgggacgaagaaaaggaaattgttttgtaa

SEQ ID NO: 11152 - DNA, 1305 bp, Artificial Sequence
  Description of Artificial Sequence: Synthetic polynucleotide
atgtctcaatacgcaagctcttcctcttggacttctttcttgaagtctatcgcttctttcaatggtgatctttcttctttatctgctcctccattcattttatctccaatctctttgaccgagttttctcagtactgggctgaacatccagagcttttcttggaaccctcttttatcaatgacgataattacaaagaacactgtttaattgaccctgaagtcgagtctcccgaattggcccgtatgttggccgttactaaatggttcatttccactttaaaatctcaatactgttctcgtaatgaatccttaggttctgagaaaaaacctttgaacccatttttaggtgagttgttcgttggtaaatgggaaaataaagagcatcctgaatttggagaaacggttttgttaagtgagcaagtttctcaccatccacccgtcactgctttttccatcttcaatgataagaacaaggttaagttacaaggctacaaccaaattaaagccagtttcactaaatccttaatgttgactgttaaacaatttggtcacactatgttggatattaaggatgagagttatttggttaccccacctccattgcatattgaaggtattcttgtcgcttctccctttgttgaattggaaggaaaaagttatatccaatcttctacaggtttactttgtgttattgaattttctggtagaggctacttttctggtaaaaagaattctttcaaggcaagaatttacaaagactctaaagatagcaaggacaaggaaaaggcattatacacaatatctggccaatggtctggctcttctaaaataatcaaggcaaataagaaagaagaatctagattattttacgatgctgctagaatccctgctgaacatttgaatgtcaagcctttggaggagcaacacccattggaaagtagaaaagcctggtacgacgtggctggtgccatcaaattaggcgattttaacttaattgccaaaacgaaaactgaattggaagaaacgcaaagagaattgagaaaagaggaagaagctaaaggcattagctggcaaagaagatggttcaaagattttgactactctgtcacgcccgaagaaggcgcccttgtacctgaaaaggatgacactttcttaaaactcgcctctgctttgaatttatctacgaagaatgctccaagtggtactttggtgggtgacaaagaagacaggaaggaggatctttcctccattcattggagattccaaagagagttgtgggacgaagaaaaggaaattgttttgtga

SEQ ID NO: 11153 - DNA, 447 bp, Saccharomyces cerevisiae
atgttagtaaagacgattagccgaactattgaatcagaatctggatttctacagccgacgctggatgttattgctactctacctgcagacgatcgttctaaaaaaatacctattagtctggtagtgggatttaaacaagaggcctcgctgaattcatcttcatccttatcatgttattactacgccattcccttaatgagggatagacatattaacctcaaatcaggcggaagcaacgttgtggggataccgttattagatactaaagatgaccggattcgtgatatggctagacacatggccacaataatatctgaaaggttcaataggccgtgttatgtaacgtggtcatcgctgcctagtgaagatccctctatgctagtagcaaaccatttatatatcttaaagaagtgtctcgatctcttgaaaactgaactcggtgagtaa

SEQ ID NO: 11154 - DNA, 447 bp, Artificial Sequence
  Description of Artificial Sequence: Synthetic polynucleotide
atgttagtaaagacgattagcaggactattgaaagtgaatctggatttttgcagccgacgttagatgttattgctactttacctgcagacgatcgttctaaaaaaatacctattagtttagtagtgggatttaaacaagaggccagtttgaattcttcttcttccttaagttgttattactacgccattcccttaatgagggatagacatattaacctcaaatctggcggaagcaacgttgtggggataccgttattagatactaaagatgacagaattcgtgatatggctagacacatggccacaataatatctgaaaggttcaataggccgtgttatgtaacgtggtcctctttgcctagtgaagatccctctatgttggtagcaaaccatttatatatcttaaagaagtgtctcgatctcttgaaaactgaactcggtgagtga

SEQ ID NO: 11155 - DNA, 324 bp, Saccharomyces cerevisiae
atggctgaatcccatagattgtacgtcaaaggtaagcacttatcctaccaaagatccaagagagtcaacaacccaaatgtctctttgatcaagatcgaaggtgtcgctactccacaagatgctcaattttacttgggtaagcgtattgcctacgtctacagagcctccaaggaagtcaggggttctaagattagagttatgtggggtaaggttaccagaactcacggtaactctggtgtcgttagagccaccttcagaaacaatttgccagccaagaccttcggtgcttctgttagaatcttcttgtacccatccaacatctaa

SEQ ID NO: 11156 - DNA, 324 bp, Artificial Sequence
  Description of Artificial Sequence: Synthetic polynucleotide
atggctgaatcccatagattgtacgtcaaaggtaagcacttatcctaccaaagatccaagagagtcaacaacccaaatgtctctttgatcaagatcgaaggtgtcgctactccacaagatgctcaattttacttgggtaagcgtattgcctacgtctacagagcctccaaggaagtcaggggttctaagattagagttatgtggggtaaggttaccagaactcacggtaactctggtgtcgttagagccaccttcagaaacaatttgccagccaagaccttcggtgcttctgttagaatcttcttgtacccatccaacatctga

SEQ ID NO: 11157 - DNA, 2598 bp, Saccharomyces cerevisiae
atgtcgtacaccaataaacgtcatacatactacggagggtttaccaacgatttgtctgacacatttcagtaccctcaaagaacagatgagcaaaggcggaaacatgtaacgtttggtccttatatcctagggtcgacgttaggagaaggagagttcggaaaagtgaagctaggctggccaaagaatttttcaaacagctctaattcaacttttgacttcccaaaacaagtagcaattaaacttatcaaacgtgatagcatatcgaatgattacaggaaagaagttaaaatatacagagaaatcaacgccttaaaacacttatcacatccgaatatcgtaaaattagaagaagtgttgcaaaattctaggtacattggtattgtcctagagtacgcatgcgggggagaattctataaatatattcaaaaaaaaaggaggcttaaggaaatgaatgcatgcaggttattttctcagctaataagtggagtacattacatacattctaagggacttgttcacagagatctcaaattggaaaatctattactagacaagaatgagaacctagttattacagattttgggtttgtcaatgagttttgctcacgaaacgaattaatgaagacgtcatgtggctctccatgctacgcagcgcctgaactagtgataagcgccgaaccatacgaagctagaaaagcagatatatggtcatgtggagttatactttacgctatactagctggatatttaccgtgggatgatgatccaaataatcctgaaggcagcgatataggaagactttataattatattaactccacaccattaaagttccctgattatattcttcctatacctcgggacttattaagacgcatgctggtctcagacccaaagaaaagaataaacctgaaacagatcaagaaacatgaatggctaaagcctcattcttcattcttatccataacacctgatgagtgggacaaactaaacaatactcaatccgtgttcagattagcaaaaccaagaagaagatatggatctagaccacaatccagttgttctacctcatctcttggctcaaggagtgataaaagggattcactggtcattgattcaactttaattactttcccggctccgcctcaagaatcacaaaatcatattataaccagaccggcttctattgcatctgaccagcggctgtcacctataagaagatctaataggcacaatagaagtaactctgctgcatccgttgccttgcaggcagtggtgaacgcagatagggaatatgtgttaagtcatgaacaatcattatccccagtacaaaacattagacaaactacgggaaacatgactgccagtctttcacctccaccagccataagtccaggcgatattataatcgaaaccacacctattaaaagaaatacaatttctgggagtagtattgtaccaagtttagaagaagagtcgtctaccacaatgcaaacaagcaagattcaaccaaataacatggcttcatcacaaaatcatcaatacaataaaaataagacccaaaatagtctccaatctgctaaaaatttctaccgtacgtcttcctcatcccatacaaagccacggccaacttcataccatcctggctcatacacaacacctccctacaattcaaatacgctctccatatatgagatcaacgaaaaagctaaaagtagcgcttcatcacaaacgctgaatcaaagagacacatccccatttgattccacaccataccttgccctagatacatgcataacctcatcctcttccatcgaaagctctccaaagttaattacgcacggccaattttcagtagcaaaaccctctgttgatttgcaaagcgtatctggtgacttgatcaagtataagagggacgctgatgtagtaacgagaatctatgatgaaaaatacaaacagaagcgcaaaagtttgagatatagcggcatattcagtgacatctcatgcgatacggtcaccgaagagtctgatgaattgaggccaccagaatctcctcttcaacaacatgaaggacaagaatcaattgataaggcgaaaacggaggacacaagtgaaaagggtagtaaaagtagcaacatcgcgaaagctacagcacaaaaacacgtcaataaccatctagaaagatcacttaacgaagcagagtcaacaaagaaaagatttagctttctttccttgtactcttatgatacttccaaatctagtttatactcatcaatggattccaaacggaaaccttctccaccttcccaaagacgcccaaaaaaggatgacagttatcaaacaaattcaaagaatcattatatcactgcttcaaatatgcaaacatcccatcaagtctcaaaagacctgcctgcaccaacgatggtgcaaaataaatgtactttagaaactaaaaaagcggtccgaagcaacaggtcctccataatggtatctgaggtcaacaaggcaagcgtagacaataaagcagcccaaagtccagaacattcaaccgcaaaaagagtattagggtttttcaaaagaagaagtatgaaaatctag

SEQ ID NO: 11158 - DNA, 2598 bp, Artificial Sequence
  Description of Artificial Sequence: Synthetic polynucleotide
atgagttacaccaataaacgtcatacatactacggagggtttaccaacgatttgtctgacacatttcagtaccctcaaagaacagatgagcaaaggagaaaacatgtaacgtttggtccttatatcttggggtccacgttaggagaaggagagttcggaaaagtgaagttgggctggccaaagaatttttccaacagctctaattctacttttgacttcccaaaacaagtagcaattaaacttatcaaacgtgatagcatatccaatgattacaggaaagaagttaaaatatacagagaaatcaacgccttaaaacacttatctcatccgaatatcgtaaaattagaagaagtgttgcaaaattctaggtacattggtattgtcttggagtacgcatgcgggggagaattctataaatatattcaaaaaaaaaggaggcttaaggaaatgaatgcatgcaggttattttctcagttgataagtggagtacattacatacattctaagggacttgttcacagagatctcaaattggaaaatttattattagacaagaatgagaacttggttattacagattttgggtttgtcaatgagttttgctctagaaacgaattaatgaagacgtcctgtggctctccatgctacgcagcgcctgaattagtgataagcgccgaaccatacgaagctagaaaagcagatatatggtcttgtggagttatactttacgctatattggctggatatttaccgtgggatgatgatccaaataatcctgaaggcagcgatataggaagactttataattatattaactccacaccattaaagttccctgattatattcttcctatacctagagacttattaagacgcatgcttgtctctgacccaaagaaaagaataaacttgaaacagatcaagaaacatgaatggttaaagcctcattcttctttcttatccataacacctgatgagtgggacaaattgaacaatactcaatccgtgttcagattagcaaaaccaagaagaagatatggatctagaccacaatccagttgttctacctcttctcttggctccaggagtgataaaagggattctttggtcattgattctactttaattactttcccggctccgcctcaagaatctcaaaatcatattataaccagaccggcttctattgcatctgaccagagattatctcctataagaagatctaataggcacaatagaagtaactctgctgcatccgttgccttgcaggcagtggtgaacgcagatagggaatatgtgttaagtcatgaacaatctttatccccagtacaaaacattagacaaactacgggaaacatgactgccagtctttctcctccaccagccataagtccaggcgatattataatcgaaaccacacctattaaaagaaatacaatttctgggagtagtattgtaccaagtttagaagaagagtcttctaccacaatgcaaacaagcaagattcaaccaaataacatggcttcttctcaaaatcatcaatacaataaaaataagacccaaaatagtctccaatctgctaaaaatttctaccgtacgtcttcctcctcccatacaaagccaagaccaacttcttaccatcctggctcttacacaacacctccctacaatagtaatacgctctccatatatgagatcaacgaaaaagctaaaagtagcgcttcttctcaaacgttgaatcaaagagacacatccccatttgattccacaccataccttgccttggatacatgcataacctcttcctcttccatcgaaagctctccaaagttaattacgcacggccaatttagcgtagcaaaaccctctgttgatttgcaaagcgtatctggtgacttgatcaagtataagagggacgctgatgtagtaacgagaatctatgatgaaaaatacaaacagaagcgcaaaagtttgagatatagcggcatattcagtgacatcagttgcgatacggtcaccgaagagtctgatgaattgaggccaccagaatctcctcttcaacaacatgaaggacaagaaagtattgataaggcgaaaacggaggacacaagtgaaaagggtagtaaaagtagcaacatcgcgaaagctacagcacaaaaacacgtcaataaccatttggaaagatctcttaacgaagcagagtctacaaagaaaagatttagctttctttccttgtactcttatgatacttccaaatctagtttatactcttctatggattccaaaagaaaaccttctccaccttcccaaagacgcccaaaaaaggatgacagttatcaaacaaattctaagaatcattatatcactgcttctaatatgcaaacatcccatcaagtctccaaagacttgcctgcaccaacgatggtgcaaaataaatgtactttagaaactaaaaaagcggtccgcagcaacaggtcctccataatggtatctgaggtcaacaaggcaagcgtagacaataaagcagcccaaagtccagaacattctaccgcaaaaagagtattagggtttttcaaaagaagaagtatgaaaatctga

SEQ ID NO: 11159 - DNA, 1521 bp, Saccharomyces cerevisiae
atggcttcaatgttcagaccaccagaatccaataggagtcaccaaaagactccaaaattaacgcttccagtaaatttagttcaaaatgcgaaatccactaatgatgggcaacatctcaaccggtcaccgtactcgtcagtgaacgaaagcccatactccaacaatagcacttcagctacttccactacgtcatccatggcttcaaattccactttgttgtacaatagatcatctactacaactattaaaaatagaccggtaccacctccattacctcccctagtactaacgcaaaaaaaagacggtatagaatatagagttgccggcgatagtcagctttctgaaagattttctaatttgcatgttgatataacttacaaggaactactatctagtgctccaatttccactaagttatccaacatagataccacttttatcaagaaagatctcgacacaccagaaggcgaggattcatacccctcgacacttctttctgcgtacgacttcagcagtagcgggagcaactccgcccctttaagtgcaaataacataatttcttgttccaacttaatacaaggaaaagacgtagaccagttagaggaagaagcatggaggtttgggcatctcaaggatgagattactacactaggaattctaggagaaggcgcgggtggttctgtagccaagtgccgattaaaaaatggaaaaaaggtttttgcgttgaagacaatcaacactatgaatactgacccagaatatcaaaagcaaatattcagagagctacaatttaataagagttttaagtccgattatattgtgcagtactatggtatgtttaccgacgaacagagttcttcaatatacattgccatggaatatatgggaggaaaatcactggaggcaacgtataaaaatttgttgaaacgtggcggtagaataagtgagagggtgataggaaagatagcagaatctgtcttaagaggtttatcatacttacacgaaaggaaagtcatccacagggacattaaaccccaaaacattcttcttaatgaaaaaggggaaatcaaattatgcgatttcggtgtcagtggggaggctgttaactctttagcgatgacatttactggaacgtcattttatatggccccagaacgaatacaaggccaaccatacagcgtaacctgtgatgtatggtccttaggattaactcttctggaggttgctggagggagatttccatttgaatctgacaaaataacgcaaaacgtggctcctatagaattattgacgatgatcctgacgttttctccccagttgaaagatgagccagaactagacatatcctggagcaagacatttagatcttttatcgactattgtttaaaaaaagatgccagagagaggccttctcccaggcaaatgttaaagcatccctggattgtagggcaaatgaaaaaaaaagtcaacatggaacggtttgtaaagaaatgctgggaaaaggaaaaggatgggatataa

SEQ ID NO: 11160 - DNA, 1521 bp, Artificial Sequence
  Description of Artificial Sequence: Synthetic polynucleotide
atggcttccatgttcagaccaccagaatccaataggagtcaccaaaagactccaaaattaacgcttccagtaaatttagttcaaaatgcgaaatccactaatgatgggcaacatctcaacagatctccgtactcttctgtgaacgaaagcccatactccaacaatagcactagtgctacttccactacgtcttccatggcttctaattccactttgttgtacaatagatcttctactacaactattaaaaatagaccggtaccacctccattacctcccttagtattgacgcaaaaaaaagacggtatagaatatagagttgccggcgatagtcagctttctgaaagattttctaatttgcatgttgatataacttacaaggaattattatctagtgctccaatttccactaagttatccaacatagataccacttttatcaagaaagatctcgacacaccagaaggcgaggattcttacccctccacacttctttctgcgtacgacttcagcagtagcgggagcaactccgcccctttaagtgcaaataacataatttcttgttccaacttaatacaaggaaaagacgtagaccagttagaggaagaagcatggaggtttgggcatctcaaggatgagattactacattaggaattttaggagaaggcgcgggtggttctgtagccaagtgcaggttaaaaaatggaaaaaaggtttttgcgttgaagacaatcaacactatgaatactgacccagaatatcaaaagcaaatattcagagagttacaatttaataagagttttaagtccgattatattgtgcagtactatggtatgtttaccgacgaacagagttcttctatatacattgccatggaatatatgggaggaaaatctttggaggcaacgtataaaaatttgttgaaacgtggcggtagaataagtgagagggtgataggaaagatagcagaatctgtcttaagaggtttatcttacttacacgaaaggaaagtcatccacagggacattaaaccccaaaacattcttcttaatgaaaaaggggaaatcaaattatgcgatttcggtgtcagtggggaggctgttaactctttagcgatgacatttactggaacgtctttttatatggccccagaaagaatacaaggccaaccatacagcgtaacctgtgatgtatggtccttaggattaactcttttggaggttgctggagggagatttccatttgaatctgacaaaataacgcaaaacgtggctcctatagaattattgacgatgatcttaacgttttctccccagttgaaagatgagccagaattagacatatcctggagcaagacatttagatcttttatcgactattgtttaaaaaaagatgccagagagaggccttctcccaggcaaatgttaaagcatccctggattgtagggcaaatgaaaaaaaaagtcaacatggaaagatttgtaaagaaatgctgggaaaaggaaaaggatgggatatga

SEQ ID NO: 11161 - DNA, 1383 bp, Saccharomyces cerevisiae
atgagcactttagatattgcagaagacaacaaaataaaaaatgaagaattcaaaatttggaaaaaatcaataccctcattataccaacatatttcaagtttgaagcctatctttggctcaggcgttgacgaatctccatcgacacttaggagtatagttttcactaacgatagctcatgtaataaatccaaaggtgttttgagcgtaccacttttatattctcaagggagtgaaatctttgaggtggattgtatagtgccactcggacttcattacaaaaaacctgaaagcatttcagaaccgttagtacaaccggattataccatggaatctcaaaaggtggagcagactgttttgattccaaaatgggaatttaaaggtgaaacgattgcaaagatgatttacgtggataacagcgaaataaatgtaaaggtgatagccctttctaccaatggttctttggcatggttcagagaaggtgtcaaatcgcccgtttacacaatgatggagccatccacttctctaagttcagcatcgtccggaaatcaaaataaaccctgtgttgattttgcaatttctaacgattcaaaaaccttaacagtaactaaggaaaaacatcttgataatgaaaacgctacaataaaattgatagacaactcaggtaaaataggagaagtgcttcgtacaatacctgttcctggcataaagaatattcaagaaatcaagtttttgaataatcaaatattcgccacttgttctgatgacggtatcataaggttttggggtaatgagataggcaaaaagcccctttggattctaaacgattctttggacggcaaaacaacttgttttgctgcatcaccgtttgttgatacattatttatgacgggaactagtggtggggctctcaaggtttgggatatacgtgcagttatcgctttaggggatgctgatgctgagttaaatatcaaccaaggacataataaagtcaatgaactattcaaagttcatcacttttatagcgagcaagtgtccaaaatagagttttcttccatttcgcctatggaagtggttacaattggagggttaggtaatgtttaccactggaatttcgaacctgtttttgccatttataacgagatacatgaggactttcaaggcataatatctgacgaattggaggccgaaagcatggcattttatcacactgagggctgcagaagagaaataggagaaaataataaggttaataccgttgcttatcacaaatacattgaggatctagttgctacagttgatagtgacgggttgttaactgtatataagccgtttactggaaaagttttagatggcagtagagaggttggagctgccaaaagttaa

SEQ ID NO: 11162 - DNA, 1383 bp, Artificial Sequence
  Description of Artificial Sequence: Synthetic polynucleotide
atgagcactttagatattgcagaagacaacaaaataaaaaatgaagaattcaaaatttggaaaaaatctataccctctttataccaacatatttccagtttgaagcctatctttggcagtggcgttgacgaatctccatctacacttaggagtatagttttcactaacgatagcagttgtaataaatccaaaggtgttttgagcgtaccacttttatattctcaagggagtgaaatctttgaggtggattgtatagtgccactcggacttcattacaaaaaacctgaaagcatttctgaaccgttagtacaaccggattataccatggaatctcaaaaggtggagcagactgttttgattccaaaatgggaatttaaaggtgaaacgattgcaaagatgatttacgtggataacagcgaaataaatgtaaaggtgatagccctttctaccaatggttctttggcatggttcagagaaggtgtcaaaagtcccgtttacacaatgatggagccatccacttctttgagttctgcatcttccggaaatcaaaataaaccctgtgttgattttgcaatttctaacgattctaaaaccttaacagtaactaaggaaaaacatcttgataatgaaaacgctacaataaaattgatagacaacagtggtaaaataggagaagtgcttcgtacaatacctgttcctggcataaagaatattcaagaaatcaagtttttgaataatcaaatattcgccacttgttctgatgacggtatcataaggttttggggtaatgagataggcaaaaagcccctttggattttgaacgattctttggacggcaaaacaacttgttttgctgcaagtccgtttgttgatacattatttatgacgggaactagtggtggggctctcaaggtttgggatatacgtgcagttatcgctttaggggatgctgatgctgagttaaatatcaaccaaggacataataaagtcaatgaattattcaaagttcatcacttttatagcgagcaagtgtccaaaatagagttttcttccatttctcctatggaagtggttacaattggagggttaggtaatgtttaccactggaatttcgaacctgtttttgccatttataacgagatacatgaggactttcaaggcataatatctgacgaattggaggccgaaagcatggcattttatcacactgagggctgcagaagagaaataggagaaaataataaggttaataccgttgcttatcacaaatacattgaggatttggttgctacagttgatagtgacgggttgttaactgtatataagccgtttactggaaaagttttagatggcagtagagaggttggagctgccaaaagttga

SEQ ID NO: 11163 - DNA, 1062 bp, Saccharomyces cerevisiae
atgtcattaccacaatggtgtccaccgcattccaccttaaaaagaaatccaactacaggagaggacgtatactgcatatgtaaaaggccagactatggggagctgatggtgggatgtgatggttgtgatgactggtttcatttcacctgccttcatattcctgagcagtttaaggacctggtgttctctttttattgtccttactgtcaagcggggattactggtaagaataaggacgccataatcaatggtgaagggagcttgccaaaaaccttatggaaaagaaaatgtaggataagtgattgctacaaaccatgtttacaggatagtaaatactgttctgaggaacatggtagagaatttgtgaatgatatttggtcgcgattgaaaacagatgaggatagagcagtcgtcaagaaaatggtcgaacaaacaggacacatagataaattcaagaaatttggacaactggatttcattgataacaatatagttgtaaaaacagatgacgaaaaggaaatattcgatcaaattgttgtacgagacatgacgttaaaaactcttgaagatgatctgcaagaggttcaagagatatcgctaccattattcaaaaaaaagctagaacttttggaagtatatttgggatggttagacaacgtatataccgaaatgcgcaagctggacgatgatgctgcaagccatgtggaatgtggtaaagaagattccaaggggacaaaaaggaagaagaagaaaaatagcagcaggagtagggctaggaaaaatatatgtggctattgttctacatacgagcgaataccctgctctgtggaagaatttgtcagagattttggaagtaatgaggaagccaccaaaatacatgaggtatgcacgaagtggaagtgtaacagacatttggattgggtgtctactaatcaggaacaatacctccagcagattgactctttagaatctatgcaagaaaggttgcaacatctgatacaggccaggaaaaagcaactaaatatacaatactatgaggaaattttaagaagaggtttgtaa

SEQ ID NO: 11164 - DNA, 1062 bp, Artificial Sequence
  Description of Artificial Sequence: Synthetic polynucleotide
atgtctttaccacaatggtgtccaccgcattccaccttaaaaagaaatccaactacaggagaggacgtatactgcatatgtaaaaggccagactatggggagttgatggtgggatgtgatggttgtgatgactggtttcatttcacctgccttcatattcctgagcagtttaaggacttggtgttctctttttattgtccttactgtcaagcggggattactggtaagaataaggacgccataatcaatggtgaagggagcttgccaaaaaccttatggaaaagaaaatgtaggataagtgattgctacaaaccatgtttacaggatagtaaatactgttctgaggaacatggtagagaatttgtgaatgatatttggagcagattgaaaacagatgaggatagagcagtcgtcaagaaaatggtcgaacaaacaggacacatagataaattcaagaaatttggacaattggatttcattgataacaatatagttgtaaaaacagatgacgaaaaggaaatattcgatcaaattgttgtaagagacatgacgttaaaaactcttgaagatgatttgcaagaggttcaagagatatctttaccattattcaaaaaaaagttggaacttttggaagtatatttgggatggttagacaacgtatataccgaaatgcgcaagttggacgatgatgctgcaagccatgtggaatgtggtaaagaagattccaaggggacaaaaaggaagaagaagaaaaatagcagcaggagtagggctaggaaaaatatatgtggctattgttctacatacgagagaataccctgctctgtggaagaatttgtcagagattttggaagtaatgaggaagccaccaaaatacatgaggtatgcacgaagtggaagtgtaacagacatttggattgggtgtctactaatcaggaacaatacctccagcagattgactctttagaatctatgcaagaaaggttgcaacatttgatacaggccaggaaaaagcaattgaatatacaatactatgaggaaattttaagaagaggtttgtga

SEQ ID NO: 11165 - DNA, 3831 bp, Saccharomyces cerevisiae
atgataactaacaccgagttcgatgtgcccgtagattggttgtataaaggtaagagtagacggaagacaaatacgaagccatcgaggccttctacgtcgccagcctcctcttcatctacgtcctcttcgaaaaacggagacaatagcacgagtggtaacaggtctagcaatgataagcctcgtgcgaggtcgtcatctgtatccaatgcagcactttgtaatactgagaaaccagatttgaagaggaacgatggtaatacctctgcatcagacactgataacataccgctacttactcctattaatagcggtaaccggagcgattccgctgacattgataatccggctaccgtagacgccatagaccttatagataatgatgacaacggctcaagtactcaatttgtaaggaaaaaacgttccacttctatatccaatgctgtggtctcgtccaaaccaagactggccagttctgccataaacgccaccgcatcttcttctgttggcaagggaaagcacccgccaatttcttcaccatctaatgctactctcaagagaagcaactcgactagtggagaaaagactaaaaggtcgatttttggatctttgtttagcaaacggtctacctcttcttcagcttccactgccaagaaaccattacctgttgttaatactagcacgactgagaatgagtctggtggcattaaagcagttgcgactcctgatccacgggtgaaggagatatcatcaccaatgagaggagtggcaccaacagctagcaagccacagacacctatactcccctcccctgcacttgcagtaaaagacctatctacagtttcattgaaaagggtctcgtttgccgtcgataaattcgaatccgatcctccccaacaacttccttcaagaaccccaaaaaagggaaacatccttatccctgatgacatgataagcgaggttccttctatttccgtgggtatttccagtagcaaccaatcggccaagtcaaccaattccaacattaagggaccgttgtacactaagaagtctaaagaatatatactcgccctggaaaatcaaaagttggctttaagggaggctgctaagcatcagcaagaagctcattttgctgctaatagaatagcctttgaagtagccaattttaagactgcttcggatgcaggcggtaagcttactgaaaagtcatcagaaggcaccattacgaagcaaagagaagaggtgtcacctccaaatgttgaagctgatcgggagcttgagaataataaacttgcagaaaacctctcaaaagccggcattgataagcccattcatatgcatgagcactatttcaaggaacctgatcaagataagtaccaagacggtcattctattgaaaataacgaagttacgctggatgttatttacacaagatgctgccatttaagggaaattttacccattccgtctaccctaagacaagtaaaggacaagacagctcccttgcaaatattgaagtttttgaaccctaagcctaccttgatcgatattctttccttttgtgatttcatcaccattgctcccattcacacgattgttttcgacaatgtagctttaaaccaggatatgttcagaataattatttctgctttggtaaactccacagttttggacaaattgagtttaagaaatgtacgaatcgaccaagatggatggaaattactatgtaagttccttttgctaaacaaatcactgaacaagctcgacatttcccaaacgaaaatcaaatctgaccttgctgaatcactatatcgccataacatggattggaacttgtttactgacgtcttgtctcagagatctcacaaacctatagaagaattgttattcaatggtattcaatttagcaaaattccttactcatgctttgcacgtttactgacatcctttgctacccaaaaaaactttccagaatcgggcatcaggcttggtttagcaggtgccactacttccaatatctctcaggattgtctgaaatttatcttcaattggatgtctcaatataacgtccagggtgtggatctagcgtttaatgatctgtccactatgattaagccaatggttggtaaactatctgctctatcatatgataacttaagatatttcattttgaacagcactaatatttcgacttcttatgatttagctttgctcttgaaatatctttctaagttgcctaacttgatttttttggatttgagtaatttgtcgcaatgctttcctgacattttaccctacatgtacaagtatttaccaagatttccgaacctgaagaggatacatttggatagcaataatttgacattaaaggaactagctgtcgtttgtaatattttgattaagtgcaaatcgctctcgcatgtgtcaatgactaatcaaaacgttgaaaacttctatctaatgaacggcacagattctcccgttcaacaaactaacacagacggcgacttggatagttcgagcacattggacgttaagggccaatttgctaaaaatagtttttcatccacactttacgcatttgctagagactctccaaacttgattggtttagattttgactatgatttgatatcagaagagattcaatcaagaatagcactgtgcttgatgagaaatatgaaacggaccatggattcgactttccagttagatgaattggattcgcaagatgatttgctattcgatggctctttagtaactatgaccgctgaaagtgttttagaaaaactgaacttgttaagcgataagagtacaaaggtcaaaaaagacaccacgaagagatatttgctgaaaaaatatattgaaaagttccatatcttgcaccataatgttcagcatacaatagatactatgttcgaaaaaaggaaatcaggtgaattgccattgcaagaaaaagaaaaccttgtaagattactccttttggaacaaaacttatgcaatatactagaattgttttcgcataatccgaatctgaatgatgtccttggatccagcagggatgattcgaaggaaagtgttgactccagcgaagattcaaaattaccagcattgaagcacgttgaatccggataccatgttcccgaagaaaaaatacaacctgagaatgatgtaattacagcaagaccacatttaatggccaccgattctggtaaaactattgacgttttcacaggcaaaccattggtgttcaagcatacatcatctagtacttctgtaggttgtaaaaagcaggaagaagaagaaggtgaactacataaatggggtttcttcgttcagcagcagaggtctttataccctgaaaatgaatcaacaaggcagacaccttttgcatcaggtgatacgcctatcaacacagaaacagctggtaagtcaacttcatctccttcagtttcaacttctaacaatgaaactgctaccactagtttatttagcccagctaatcctaagattttaccaaaaattccatccggtgctgtcttaagatcggcaatcatgaaggctaaaggtattgattctatcgatgatttgattcagaacgttaactccaacaacatagaattggagaacatttatggtgaatccattcagaatagcgcttcgacatttacaccaggcgtggattctgatgtatctgcgcccaataccgataaaggatccgtagaaacattgcctgcagtctcaactgacgacccaaattgtgaagtcaaagtcactgctacctatgacaaactattaaataatttgtcgatggagaggtcaatcagactttga

SEQ ID NO: 11166 - DNA, 3831 bp, Artificial Sequence
  Description of Artificial Sequence: Synthetic polynucleotide
atgataactaacaccgagttcgatgtgcccgtagattggttgtataaaggtaagagtagaagaaagacaaatacgaagccatctaggccttctacgtctccagcctcctcttcttctacgtcctcttctaaaaacggagacaatagcacgagtggtaacaggtctagcaatgataagcctcgtgcgaggagttcttctgtatccaatgcagcactttgtaatactgagaaaccagatttgaagaggaacgatggtaatacctctgcaagtgacactgataacataccgttacttactcctattaatagcggtaacagaagcgattccgctgacattgataatccggctaccgtagacgccatagaccttatagataatgatgacaacggctccagtactcaatttgtaaggaaaaaacgttccacttctatatccaatgctgtggtctcttccaaaccaagattggccagttctgccataaacgccaccgcatcttcttctgttggcaagggaaagcacccgccaatttcttctccatctaatgctactctcaagagaagcaactctactagtggagaaaagactaaaaggtctatttttggatctttgtttagcaaaagatctacctcttcttctgcttccactgccaagaaaccattacctgttgttaatactagcacgactgagaatgagtctggtggcattaaagcagttgcgactcctgatccaagagtgaaggagatatcttctccaatgagaggagtggcaccaacagctagcaagccacagacacctatactcccctcccctgcacttgcagtaaaagacttgtctacagtttctttgaaaagggtcagttttgccgtcgataaattcgaatccgatcctccccaacaacttccttccagaaccccaaaaaagggaaacatccttatccctgatgacatgataagcgaggttccttctatttccgtgggtatttccagtagcaaccaatctgccaagtctaccaattccaacattaagggaccgttgtacactaagaagtctaaagaatatatactcgccttggaaaatcaaaagttggctttaagggaggctgctaagcatcagcaagaagctcattttgctgctaatagaatagcctttgaagtagccaattttaagactgcttctgatgcaggcggtaagcttactgaaaagagttctgaaggcaccattacgaagcaaagagaagaggtgtctcctccaaatgttgaagctgatagagagcttgagaataataaacttgcagaaaacctctctaaagccggcattgataagcccattcatatgcatgagcactatttcaaggaacctgatcaagataagtaccaagacggtcattctattgaaaataacgaagttacgttagatgttatttacacaagatgctgccatttaagggaaattttacccattccgtctaccttgagacaagtaaaggacaagacagctcccttgcaaatattgaagtttttgaaccctaagcctaccttgatcgatattctttccttttgtgatttcatcaccattgctcccattcacacgattgttttcgacaatgtagctttaaaccaggatatgttcagaataattatttctgctttggtaaactccacagttttggacaaattgagtttaagaaatgtaagaatcgaccaagatggatggaaattattatgtaagttccttttgttgaacaaatctttgaacaagctcgacatttcccaaacgaaaatcaaatctgaccttgctgaatctttgtatcgccataacatggattggaacttgtttactgacgtcttgtctcagagatctcacaaacctatagaagaattgttattcaatggtattcaatttagcaaaattccttactcttgctttgcacgtttattaacatcctttgctacccaaaaaaactttccagaaagtggcatcaggcttggtttagcaggtgccactacttccaatatctctcaggattgtttgaaatttatcttcaattggatgtctcaatataacgtccagggtgtggatttggcgtttaatgatttatccactatgattaagccaatggttggtaaattatctgctttatcttatgataacttaagatatttcattttgaacagcactaatatttctacttcttatgatttagctttgctcttgaaatatctttctaagttgcctaacttgatttttttggatttgagtaatttgtctcaatgctttcctgacattttaccctacatgtacaagtatttaccaagatttccgaacttgaagaggatacatttggatagcaataatttgacattaaaggaattggctgtcgtttgtaatattttgattaagtgcaaatctctctctcatgtgtccatgactaatcaaaacgttgaaaacttctatttaatgaacggcacagattctcccgttcaacaaactaacacagacggcgacttggatagtagtagcacattggacgttaagggccaatttgctaaaaatagtttttcttccacactttacgcatttgctagagactctccaaacttgattggtttagattttgactatgatttgatatctgaagagattcaatctagaatagcattatgcttgatgagaaatatgaaaagaaccatggattctactttccagttagatgaattggattctcaagatgatttgttattcgatggctctttagtaactatgaccgctgaaagtgttttagaaaaattgaacttgttaagcgataagagtacaaaggtcaaaaaagacaccacgaagagatatttgttgaaaaaatatattgaaaagttccatatcttgcaccataatgttcagcatacaatagatactatgttcgaaaaaaggaaatctggtgaattgccattgcaagaaaaagaaaaccttgtaagattactccttttggaacaaaacttatgcaatatattggaattgttttctcataatccgaatttgaatgatgtccttggatccagcagggatgattctaaggaaagtgttgactccagcgaagattctaaattaccagcattgaagcacgttgaatccggataccatgttcccgaagaaaaaatacaacctgagaatgatgtaattacagcaagaccacatttaatggccaccgattctggtaaaactattgacgttttcacaggcaaaccattggtgttcaagcatacatcttctagtacttctgtaggttgtaaaaagcaggaagaagaagaaggtgaattacataaatggggtttcttcgttcagcagcagaggtctttataccctgaaaatgaatctacaaggcagacaccttttgcatctggtgatacgcctatcaacacagaaacagctggtaagtctacttcttctccttctgtttccacttctaacaatgaaactgctaccactagtttatttagcccagctaatcctaagattttaccaaaaattccatccggtgctgtcttaagaagtgcaatcatgaaggctaaaggtattgattctatcgatgatttgattcagaacgttaactccaacaacatagaattggagaacatttatggtgaatccattcagaatagcgcttctacatttacaccaggcgtggattctgatgtatctgcgcccaataccgataaaggatccgtagaaacattgcctgcagtctctactgacgacccaaattgtgaagtcaaagtcactgctacctatgacaaattattaaataatttgtccatggagaggtctatcagactttga

SEQ ID NO: 11167 - DNA, 498 bp, Saccharomyces cerevisiae
atgcttcctgttataacgagatttgcaaggcctgctctgatggccatcagacctgtgaatgccatgggggttttgagagcgtccagcataacgaaaaggctttatcatcccaaggtcatagagcattatacacatccaagaaacgtcggctcattagataaaaaattgcccaacgtcggcactggtctagtgggtgcgccagcgtgcggtgatgtgatgaggttgcagatcaaagtcaacgactctactggcgttattgaagatgtcaaattcaaaacttttggatgtggctccgccattgcctcctcttcatatatgactgaattggtacaggggatgaccttggacgatgcggcaaaaattaagaacactgaaattgctaaggagttgagcttgcccccagtcaagttgcattgctctatgttagcggaagatgcgatcaaggcagctattaaggactacaaatctaagagaaacactccaaccatgttatcgtaa

SEQ ID NO: 11168 - DNA, 498 bp, Artificial Sequence
  Description of Artificial Sequence: Synthetic polynucleotide
atgcttcctgttataacgagatttgcaaggcctgctttgatggccatcagacctgtgaatgccatgggggttttgagagcgtccagcataacgaaaaggctttatcatcccaaggtcatagagcattatacacatccaagaaacgtcggctctttagataaaaaattgcccaacgtcggcactggtttagtgggtgcgccagcgtgcggtgatgtgatgaggttgcagatcaaagtcaacgactctactggcgttattgaagatgtcaaattcaaaacttttggatgtggctccgccattgcctcctcttcttatatgactgaattggtacaggggatgaccttggacgatgcggcaaaaattaagaacactgaaattgctaaggagttgagcttgcccccagtcaagttgcattgctctatgttagcggaagatgcgatcaaggcagctattaaggactacaaatctaagagaaacactccaaccatgttatcttga

SEQ ID NO: 11169 - DNA, 933 bp, Saccharomyces cerevisiae
atgacatctatagataatagacctttgccgttcatataccagttcacagccggtgccattgccggcgtctcggagctattggtgatgtatccattggacgtggtgaagacaagaatgcaattacaagtgacaaccaaaggtcatcccgctgttgttgcagcgaaagcagcagtagatcactacacgggcgtgatggattgtcttacaaaaattgtgaagaaggaaggattttcgcatctttacaagggtatcacatcgcctatattaatggaggctccgaaaagagcaattaagttctccggaaacgatacattccaaacgttttataaaaagattttccccacgcccaatggggagatgactcaaaaaatcgccatatacagtggtgcgtccgctggcgccgtggaagcctttgtcgtcgcgccttttgaactagtgaagattagattacaggatgtgaattcacagttcaagacacccattgaagttgtaaagaatagtgttgtgaaaggtggtgttttgtcacttttcaatgggttggaagccactatctggagacacgttctttggaatgccggttatttcggtataatattccaaattcggaagcttttgccggcggctaaaacaagcacggaaaagaccagaaatgatttgatcgcaggtgctattggtggcactgtcgggtgcttgttgaatacaccatttgacgtggtaaaatctaggatccaaagaagttccgggccgctgaggaagtacaactggtccctgccttcagtgctgttagtttaccgtgaggaagggtttaaagcattgtataagggatttgcgccaaaggtcatgagacttgcccccggtggtgggttattgttggtagttttcacgaacgtcatggattttttcagagaagtcaagtatggtaaaaaacaatga

SEQ ID NO: 11170 - DNA, 933 bp, Artificial Sequence
  Description of Artificial Sequence: Synthetic polynucleotide
atgacatctatagataatagacctttgccgttcatataccagttcacagccggtgccattgccggcgtcagtgagttattggtgatgtatccattggacgtggtgaagacaagaatgcaattacaagtgacaaccaaaggtcatcccgctgttgttgcagcgaaagcagcagtagatcactacacgggcgtgatggattgtcttacaaaaattgtgaagaaggaaggattttctcatctttacaagggtatcacatctcctatattaatggaggctccgaaaagagcaattaagttctccggaaacgatacattccaaacgttttataaaaagattttccccacgcccaatggggagatgactcaaaaaatcgccatatacagtggtgcgtccgctggcgccgtggaagcctttgtcgtcgcgccttttgaattagtgaagattagattacaggatgtgaattctcagttcaagacacccattgaagttgtaaagaatagtgttgtgaaaggtggtgttttgtctcttttcaatgggttggaagccactatctggagacacgttctttggaatgccggttatttcggtataatattccaaattagaaagcttttgccggcggctaaaacaagcacggaaaagaccagaaatgatttgatcgcaggtgctattggtggcactgtcgggtgcttgttgaatacaccatttgacgtggtaaaatctaggatccaaagaagttccgggccgttaaggaagtacaactggtccttaccttctgtgttattagtttaccgtgaggaagggtttaaagcattgtataagggatttgcgccaaaggtcatgagacttgcccccggtggtgggttattgttggtagttttcacgaacgtcatggattttttcagagaagtcaagtatggtaaaaaacaatga

SEQ ID NO: 11171 - DNA, 1341 bp, Saccharomyces cerevisiae
atgtcagcaaacagtggtgtaaaacgagccagtaaggcttttaaaacatgtttattttgtaaacggtcacatgttgtatgtgataagcaacgtccatgttctaggtgcgtcaagagggatattgcccatttatgcagggaagatgatattgcggttccaaatgagatgccatcacagcacgaaagttctccgaatgataataatatacagggcaaatatgcaaataaagcacacactggaattccgtctgactatcagaatgaaccagtcaataaaagtggatccacatatggagaggaactgtcaccgaaactagactcctctcttgtaaatgatacaaccagcttgctgcttccgcaacaacctgtatttgtgtccgagaatgttggttcggaattcagttctttgaatgaatttctttctatgctagaaaatcctctattgactcaaacatcactaagttccagcagtgcgagcaatgttcatttggaaaatggctcacaaaccacacaatcgccattagagtaccaaaacgacaatcgtagggatgaaataggagtggcaagacaagaaaataggtcgcctactattatgtcaggttcttccaatagtatctcgaaaggggataaacaagatcaagaaaaggaagagtctcgaattctagcgaatgcaaacgaaaacagtgcaccgacaccgaaggaacaattctttttaacagcggcggatccgtcaacagagatgacaccagaacaccggctgaagttggtcataaatgcgaagcttgaagcaggattattgaagccgtataattatgccaaggggtatgcaagactacaagactacatggacaaatatatgaatcagtcttccaagcaaaggattctgaaaccactatccaccattagaccggcgtttagaaccattgcgcgttcattgaaggatgttgacttagttttagtggaggagagcttcgagaggatgttattatcttatgatcgtgttttcacctctatgagcatgccagcgtgcttgtgtaggcgtaccggtgagatttacagagccaataaagagtttgcttcactggttgactgcacagtcgatgatttacgcgatggaaagcttgcgatctacgagttgatgacagaagaaagcgctgtgaatttctgggaaaaatacgggtccatagcgtttgataagggtcagaaggctgttttaacaagttgtagtcttcgaaccaaagatggaatccgcaaacggccatgctgttttagtttcactatcagaagggataggtacaacatcccaatttgcatcgtcgggaatttcatccctttgtcataa

SEQ ID NO: 11172 - DNA, 1341 bp, Artificial Sequence
  Description of Artificial Sequence: Synthetic polynucleotide
atgtctgcaaacagtggtgtaaaaagagccagtaaggcttttaaaacatgtttattttgtaaaagaagccatgttgtatgtgataagcaacgtccatgttctaggtgcgtcaagagggatattgcccatttatgcagggaagatgatattgcggttccaaatgagatgccatctcagcacgaaagttctccgaatgataataatatacagggcaaatatgcaaataaagcacacactggaattccgtctgactatcagaatgaaccagtcaataaaagtggatccacatatggagaggaattatctccgaaattagactcctctcttgtaaatgatacaaccagcttgttacttccgcaacaacctgtatttgtgtccgagaatgttggttctgaattcagttctttgaatgaatttctttctatgttggaaaatcctttattgactcaaacatctttgagttccagcagtgcgagcaatgttcatttggaaaatggctctcaaaccacacaatctccattagagtaccaaaacgacaatcgtagggatgaaataggagtggcaagacaagaaaataggtctcctactattatgagtggttcttccaatagtatctccaaaggggataaacaagatcaagaaaaggaagagtctagaattttggcgaatgcaaacgaaaacagtgcaccgacaccgaaggaacaattctttttaacagcggcggatccgtccacagagatgacaccagaacaccgtttgaagttggtcataaatgcgaagcttgaagcaggattattgaagccgtataattatgccaaggggtatgcaagattacaagactacatggacaaatatatgaatcagtcttccaagcaaaggattttgaaaccattgtccaccattagaccggcgtttagaaccattgcgcgttctttgaaggatgttgacttagttttagtggaggagagcttcgagaggatgttattatcttatgatcgtgttttcacctctatgagcatgccagcgtgcttgtgtaggcgtaccggtgagatttacagagccaataaagagtttgcttctttggttgactgcacagtcgatgatttacgcgatggaaagcttgcgatctacgagttgatgacagaagaaagcgctgtgaatttctgggaaaaatacgggtccatagcgtttgataagggtcagaaggctgttttaacaagttgtagtcttagaaccaaagatggaatccgcaaaaggccatgctgttttagtttcactatcagaagggataggtacaacatcccaatttgcatcgtcgggaatttcatccctttgtcctga

SEQ ID NO: 11173 - DNA, 903 bp, Saccharomyces cerevisiae
atgataagaatatgtcccattgttagatctaaggttccactgttaggaacttttcttagatccgactcatggttggcacctcatgcgctagctctaaggcgggccatatgcaaaaacgttgcattgagaagttattcagtgaacagcgaacaaccaaaacatacatttgatatttcaaaacttactagaaatgaaatccagcaattgcgagagttgaaaagagcaagggagagaaaatttaaagatcgtacggttgcattttatttcagcagcgtcgcggtacttttcttgggtttggcatatgcagcggtaccactctatagagccatttgtgctcgtactggttttggtgggattcccataacagatagaagaaaatttaccgacgataaactcattcctgtagatactgagaagagaattcgtatctcattcaccagtgaagtatcacaaattttaccgtggaaattcgttcctcaacaacgtgaggtttacgttctgcctggtgaaacagccctcgctttttataaagccaagaattacagcgataaagatattattggtatggctacttatagcatagcgcctggtgaagcagctcaatactttaataaaatccaatgtttttgctttgaagaacaaaagctagctgccggtgaagaaatagatatgcctgtcttcttttttatcgatccagattttgctagcgatccagcgatgcgaaatatcgatgatattattttacattacacattcttcagagctcattatggtgatggtacagctgtaagtgactctaaaaaggagcctgagatgaatgcagatgaaaaagcagcgtcattggctaatgctgctattttatccccagaagttatagacacaaggaaagacaactcaaattaa

SEQ ID NO: 11174 - DNA, 903 bp, Artificial Sequence
  Description of Artificial Sequence: Synthetic polynucleotide
atgataagaatatgtcccattgttagatctaaggttccattattaggaacttttcttagatccgactcttggttggcacctcatgcgttagctttgaggagagccatatgcaaaaacgttgcattgagaagttattctgtgaacagcgaacaaccaaaacatacatttgatatttccaaacttactagaaatgaaatccagcaattgagagagttgaaaagagcaagggagagaaaatttaaagatcgtacggttgcattttatttcagcagcgtcgcggtacttttcttgggtttggcatatgcagcggtaccactctatagagccatttgtgctcgtactggttttggtgggattcccataacagatagaagaaaatttaccgacgataaactcattcctgtagatactgagaagagaattcgtatctctttcaccagtgaagtatctcaaattttaccgtggaaattcgttcctcaacaacgtgaggtttacgttttacctggtgaaacagccctcgctttttataaagccaagaattacagcgataaagatattattggtatggctacttatagcatagcgcctggtgaagcagctcaatactttaataaaatccaatgtttttgctttgaagaacaaaagttggctgccggtgaagaaatagatatgcctgtcttcttttttatcgatccagattttgctagcgatccagcgatgagaaatatcgatgatattattttacattacacattcttcagagctcattatggtgatggtacagctgtaagtgactctaaaaaggagcctgagatgaatgcagatgaaaaagcagcgtctttggctaatgctgctattttatccccagaagttatagacacaaggaaagacaacagtaattga

SEQ ID NO: 11175 - DNA, 894 bp, Saccharomyces cerevisiae
atggctttccaaaaagacgctaagtcctctgcttactcctctcgtttccaaactcctttcagaagaagaagagaaggtaagactgattactaccaaagaaagagattggtcacccaacacaaggccaagtacaacactccaaagtacagattggttgttagattcactaacaaggatatcatctgtcaaatcatctcttctaccatcactggtgatgtcgtcttagctgctgcctactcccacgaattgccaagatacggtattacccacggtttgaccaactgggctgctgcttacgctactggtttgttgatcgccagaagaaccttgcaaaagttgggtttggacgaaacttacaagggtgttgaagaagttgaaggtgaatacgaattgaccgaagctgttgaagatggtccacgtccattcaaggtcttcttggatattggtttgcaaagaaccaccactggtgccagagttttcggtgctctaaagggtgcttctgacggtggtttgtacgttcctcactccgaaaacagattcccaggttgggacttcgaaaccgaagaaattgacccagaattattgagatcttacatctttggtggccacgtttcccaatacatggaagaattagctgacgatgatgaagaaagattctctgaattattcaagggttacctagctgacgacattgatgctgactctttggaagacatctacacttctgctcacgaagctatcagagctgacccagctttcaagccaactgaaaagaaattcaccaaggaacaatacgctgctgaatccaagaagtacagacaaaccaaattgtccaaggaagaaagagctgctcgtgttgctgccaagatcgctgctttggctggtcaacaataa

SEQ ID NO: 11176 - DNA, 894 bp, Artificial Sequence
  Description of Artificial Sequence: Synthetic polynucleotide
atggctttccaaaaagacgctaagtcctctgcttactcctctcgtttccaaactcctttcagaagaagaagagaaggtaagactgattactaccaaagaaagagattggtcacccaacacaaggccaagtacaacactccaaagtacagattggttgttagattcactaacaaggatatcatctgtcaaatcatctcttctaccatcactggtgatgtcgtcttagctgctgcctactcccacgaattgccaagatacggtattacccacggtttgaccaactgggctgctgcttacgctactggtttgttgatcgccagaagaaccttgcaaaagttgggtttggacgaaacttacaagggtgttgaagaagttgaaggtgaatacgaattgaccgaagctgttgaagatggtccacgtccattcaaggtcttcttggatattggtttgcaaagaaccaccactggtgccagagttttcggtgctttgaagggtgcttctgacggtggtttgtacgttcctcactccgaaaacagattcccaggttgggacttcgaaaccgaagaaattgacccagaattattgagatcttacatctttggtggccacgtttcccaatacatggaagaattagctgacgatgatgaagaaagattctctgaattattcaagggttacttggctgacgacattgatgctgactctttggaagacatctacacttctgctcacgaagctatcagagctgacccagctttcaagccaactgaaaagaaattcaccaaggaacaatacgctgctgaatccaagaagtacagacaaaccaaattgtccaaggaagaaagagctgctcgtgttgctgccaagatcgctgctttggctggtcaacaatga

SEQ ID NO: 11177 - DNA, 672 bp, Saccharomyces cerevisiae
atgaagaaacaaatattaatagttgctgcacaaagtattttatgttctactgtttttggcgagcgaagtaatgtaggcctttccactgaagagctaggaggtgactcaattttatacttcaatgaagaccctatagtgattgaaatcgataagaaagctattgacaagaagactttggaacagttggcaagcacaagagatgttgttcttactgatttaccggacactcttgagtttatagacttcaacgagtacgcgaaaatgaagtcaaaatcagatatgctactagagtatatcaacgaatacgaatttgatgattttgaaagaagttctgaaggcggtcttgaagaagaagaagaagaggatttaatttatgacttcaatgcccaagctgaagatttgggtaagcttggttcaaatatatatgaagtagtcgaagaaaagaatattgttaatacttacgatggaaaccttatcaatgcaagtacaactgaatcaacgactactattcggcctttcgtgacttctcactcctacgttgcttcttctacaccttattcgaatatttcatcattgaatgaggactacgataatgcgagcaactttttgactcctacaacagtggctcttgcggtacttttaaccattttattatttatacaggcgtattaa

SEQ ID NO: 11178 - DNA, 672 bp, Artificial Sequence
  Description of Artificial Sequence: Synthetic polynucleotide
atgaagaaacaaatattaatagttgctgcacaaagtattttatgttctactgtttttggcgagagaagtaatgtaggcctttccactgaagagttaggaggtgacagtattttatacttcaatgaagaccctatagtgattgaaatcgataagaaagctattgacaagaagactttggaacagttggcaagcacaagagatgttgttcttactgatttaccggacactcttgagtttatagacttcaacgagtacgcgaaaatgaagagtaaatctgatatgttattggagtatatcaacgaatacgaatttgatgattttgaaagaagttctgaaggcggtcttgaagaagaagaagaagaggatttaatttatgacttcaatgcccaagctgaagatttgggtaagcttggtagtaatatatatgaagtagtcgaagaaaagaatattgttaatacttacgatggaaaccttatcaatgcaagtacaactgaaagtacgactactattagacctttcgtgacttctcactcctacgttgcttcttctacaccttattctaatatttcttctttgaatgaggactacgataatgcgagcaactttttgactcctacaacagtggctcttgcggtacttttaaccattttattatttatacaggcgtattga

SEQ ID NO: 11179 - DNA, 735 bp, Saccharomyces cerevisiae
atggtagctacagtaaaaagaaccatccgtataaaaacccaacaacacattctgccagaagtgccaccagtagagaattttcctgttcgtcaatggagtatagaaattgtattattggatgatgaaggaaaagaaattcccgctacaatttttgacaaagttatttaccacttgcacccaactttcgccaatcctaacaggacatttactgacccaccatttagaattgaggaacaaggttggggtggatttcctttagatataagcgttttcttgttggaaaaagcaggtgagcggaaaataccacacgatttgaactttctacaagagagttatgaagtggagcacgttatccagattcctctcaataaaccacttttaacagaagaacttgcgaaaagtggatctactgaagaaacgacggccaatacaggcaccattgggaaaagaaggactaccacgaacacaactgcagaaccaaaggcgaagagagctaagacgggcagtgcatctaccgtgaaagggagcgtggacctagaaaaattagcgttcggattgactaaactaaatgaagatgacctggttggtgttgttcaaatggttaccgacaataaaacaccagaaatgaacgtgacgaataatgttgaagagggtgaatttataattgacttgtatagtttacctgagggattattgaaaagtctatgggactacgttaagaaaaataccgagtaa

SEQ ID NO: 11180 - DNA, 735 bp, Artificial Sequence
  Description of Artificial Sequence: Synthetic polynucleotide
atggtagctacagtaaaaagaaccatccgtataaaaacccaacaacacattttaccagaagtgccaccagtagagaattttcctgttcgtcaatggagtatagaaattgtattattggatgatgaaggaaaagaaattcccgctacaatttttgacaaagttatttaccacttgcacccaactttcgccaatcctaacaggacatttactgacccaccatttagaattgaggaacaaggttggggtggatttcctttagatataagcgttttcttgttggaaaaagcaggtgagagaaaaataccacacgatttgaactttttgcaagagagttatgaagtggagcacgttatccagattcctctcaataaaccacttttaacagaagaacttgcgaaaagtggatctactgaagaaacgacggccaatacaggcaccattgggaaaagaaggactaccacgaacacaactgcagaaccaaaggcgaagagagctaagacgggcagtgcatctaccgtgaaagggagcgtggacttggaaaaattagcgttcggattgactaaattgaatgaagatgacttggttggtgttgttcaaatggttaccgacaataaaacaccagaaatgaacgtgacgaataatgttgaagagggtgaatttataattgacttgtatagtttacctgagggattattgaaaagtttatgggactacgttaagaaaaataccgagtga

SEQ ID NO: 11181 - DNA, 1689 bp, Saccharomyces cerevisiae
atggattcgcaagtgcccaataataacgaaagcttaaaccgcttcaatgacatcatccaaagcctgcctgcaagaactaggttgaccatatgctcattatgtctgctggacaatatctccactcaactactgaggtttcttatccttaatgccaactctcccaatattatagcggttttgacggaccagacggctttcctaagctcaggcgaaacagaaatttttcaaacgttagtcaagctctttaagcagatcagaatgatttaccacaccagatctccgttactgtctgttcacgacgtggcgcctggtttatggtttcccaactcccctcccccccttatattgagaggccacgaagcgtttattattactgccataagaaaggcgaatctgctaacatttctattgacgtcgctgaactgccttaattacgggtttgagctgctacagtcgatatttctcgatattttctgtccaaatacaaacactgtcggtaacaactccctggaacaaagcggaaagtttttgaaatcgcaggctatcctatatcttgatctgaaaacacaggcttacattgccggcttgaaagagtttcaggacgagacgaacgaaatttctttagaaaagaaacaagagctactagacttaatcttcccatccaatctggctgatattctcgtgcagagaagaaccggcgattctggagacattacacttttgactccatcggagaaggacttcgtcgaaaggtgcgatcgtcggagagaaaatttaaagatcgtccaagattttaactctctgacccagagctacgaatgggctcaatttatcagagagttgctggattattgtaataaaaatatgggtctcatcatatggggcagaaagggtcgcggaaaatcaccattatatgactttgatgtcaacgagtttgatcctcaagtactcttttctacagggaccaggaccgtagaattcatggacgaccaaaatcagccaagcagtgcgtctgcttttttgtcaactgctcgtccgaatcattacagcacacatacacctaccacagatgtgtcttccaaaaaccccgctatcacacaatccattgtggatgccgctgttgcggcctcgatgagcaacagcagctctggtcctcattcctctcataacaacagcagtaacagcaacaataatggtagtatcggattaagaaaaccaaaggcgaaaagaacttggtccaaagaggaagaagaagcattagtggaaggcctgaaagaggttggcccatcgtggtctaagattctagatttatatggtcccggtggtaaaatcacggaaaatttgaagaacaggacgcaggtacaactgaaagataaagcccgtaattggaaattacaatacttgaagagtggcaaaccattgcctgactatttgataaaagtgaccggtaacttggagaaaatctacaaggcaaagaaaaaattctctcaatctccaaattcgtcaactattatggaacaaaatttatctcagcatccttcatcagctgcatctgctactgaagacactcaaactcatcaagaggattcacatgggcaaaatagtgataatatgccatctaacggactttttggcaatagtacatcggacaatacaggttttgatcctcatttagaagatgggatgtag

SEQ ID NO: 11182 - DNA, 1689 bp, Artificial Sequence
  Description of Artificial Sequence: Synthetic polynucleotide
atggattctcaagtgcccaataataacgaaagcttaaaccgcttcaatgacatcatccaaagcttacctgcaagaactaggttgaccatatgctctttatgtcttttggacaatatctccactcaattattgaggtttcttatccttaatgccaactctcccaatattatagcggttttgacggaccagacggctttcttgagcagtggcgaaacagaaatttttcaaacgttagtcaagctctttaagcagatcagaatgatttaccacaccagatctccgttattatctgttcacgacgtggcgcctggtttatggtttcccaactcccctcccccccttatattgagaggccacgaagcgtttattattactgccataagaaaggcgaatttattaacatttttattgacgtccttgaactgccttaattacgggtttgagttattgcagagtatatttctcgatattttctgtccaaatacaaacactgtcggtaacaactccttagaacaaagcggaaagtttttgaaatctcaggctatcttatatcttgatttgaaaacacaggcttacattgccggcttgaaagagtttcaggacgagacgaacgaaatttctttagaaaagaaacaagagttattagacttaatcttcccatccaatttggctgatattctcgtgcagagaagaaccggcgattctggagacattacacttttgactccaagtgagaaggacttcgtcgaaaggtgcgatcgtagaagagaaaatttaaagatcgtccaagattttaactctttaacccagagctacgaatgggctcaatttatcagagagttgttggattattgtaataaaaatatgggtctcatcatatggggcagaaagggtcgcggaaaatctccattatatgactttgatgtcaacgagtttgatcctcaagtactcttttctacagggaccaggaccgtagaattcatggacgaccaaaatcagccaagcagtgcgtctgcttttttgtctactgctcgtccgaatcattacagcacacatacacctaccacagatgtgtcttccaaaaaccccgctatcacacaatccattgtggatgccgctgttgcggcctctatgagcaacagcagctctggtcctcattcctctcataacaacagcagtaacagcaacaataatggtagtatcggattaagaaaaccaaaggcgaaaagaacttggtccaaagaggaagaagaagcattagtggaaggcttgaaagaggttggcccatcttggtctaagattttagatttatatggtcccggtggtaaaatcacggaaaatttgaagaacaggacgcaggtacaattgaaagataaagcccgtaattggaaattacaatacttgaagagtggcaaaccattgcctgactatttgataaaagtgaccggtaacttggagaaaatctacaaggcaaagaaaaaattctctcaatctccaaattcttctactattatggaacaaaatttatctcagcatccttcttctgctgcatctgctactgaagacactcaaactcatcaagaggattctcatgggcaaaatagtgataatatgccatctaacggactttttggcaatagtacaagtgacaatacaggttttgatcctcatttagaagatgggatgtga

SEQ ID NO: 11183 - DNA, 777 bp, Saccharomyces cerevisiae
atggcacccaagaaatccactaccaagaccacaagtaagggcaagaagcctgcaaccagcaaaggcaaggagaaatcaacttccaaggccgctatcaagaaaaccacggcaaaaaaggaggaagcttcctccaagagttacagggagttgatcattgaagggctcacggctttgaaggaacgtaagggatccagtcgtccggcactcaagaagtttatcaaggaaaactacccgatcgtcggatccgcaagcaactttgatttgtacttcaacaatgccataaagaagggtgtggaggccggcgattttgaacagccaaagggacccgctggtgctgtgaaactggccaagaagaaatctccagaagtaaagaaagaaaaagaggtcagtccaaaacccaagcaagccgccacttctgtgagtgcaaccgcatcaaaagcgaaagccgcatccacgaagctagcgccaaagaaagtagtgaaaaaaaaatcgcctactgttaccgccaagaaggcctcttcgccttcttcattgacctacaaggaaatgatccttaaaagcatgcctcaacttaatgacggtaagggctccagccgtatcgttttaaagaagtatgtcaaggacactttctcctccaagttgaaaacaagctcaaattttgactatctgttcaatagcgctatcaagaaatgtgttgaaaacggcgagttagtgcaaccaaagggcccctccggcattattaaactaaacaagaagaaggtcaaactctccacgtaa

SEQ ID NO: 11184 - DNA, 777 bp, Artificial Sequence
  Description of Artificial Sequence: Synthetic polynucleotide
atggcacccaagaaatccactaccaagaccacaagtaagggcaagaagcctgcaaccagcaaaggcaaggagaaatctacttccaaggccgctatcaagaaaaccacggcaaaaaaggaggaagcttcctccaagagttacagggagttgatcattgaagggctcacggctttgaaggaacgtaagggatccagtcgtccggcactcaagaagtttatcaaggaaaactacccgatcgtcggatccgcaagcaactttgatttgtacttcaacaatgccataaagaagggtgtggaggccggcgattttgaacagccaaagggacccgctggtgctgtgaaattggccaagaagaaatctccagaagtaaagaaagaaaaagaggtcagtccaaaacccaagcaagccgccacttctgtgagtgcaaccgcatccaaagcgaaagccgcatccacgaagttggcgccaaagaaagtagtgaaaaaaaaatctcctactgttaccgccaagaaggcctcttctccttcttctttgacctacaaggaaatgatccttaaaagcatgcctcaacttaatgacggtaagggctccagccgtatcgttttaaagaagtatgtcaaggacactttctcctccaagttgaaaacaagcagtaattttgactatcttttcaatagcgctatcaagaaatgtgttgaaaacggcgagttagtgcaaccaaagggcccctccggcattattaaattgaacaagaagaaggtcaaactctccacgtga

SEQ ID NO: 11185 - DNA, 2691 bp, Saccharomyces cerevisiae
atgacgcaatccctaggtatcgaacagtataaactgtcagtcgtatctggtgggaaacccgctttgaataatctcagttcagtaaccggcaataagaatatcgcccgcctatcacaagaccaacgaaactatattataccctttaacaatcagatcaaggtgtattctgtggaaactagacaatgtgttaagactctaaagtttgcaaataactccttgttatccggaatatttctgcaagaagaagagaataatgaatcgattgtaaagattctgctgggtgatataaccgttccgcaacaagaagacgctcatctgattaccgtattcaccaataatggtcatgtaattgttttaaattataaggggaagctggtcgagtcccctaagcatttcaaaatctctttggcagatgaaaagcttgcaaatgttttccatagcgagggcaactatagaattttgacaacgttcaaggaccctagtcaaaaggcacataactctttgcaatcgtacaggttatatgcattaacctttgacgatgctaaaaagcaatttgaagtggctcatcaggcagaatggcacaacgttatcttgtcaaatatttcttccaatggtaaactgctagcgcatatgtgcaaagacgtctcaacaaaagatcacgaacacaaatccatctcagttgtttcgctttttgatgattctgtaaatttaagctttcccctcggttccatcctttcttcacagactcaatccctatcctataacacaaggtacgtttctagcatggccatagacaatatgggtcaacaactggctgttggatttgcctccggagttataagtatcgtaagcctggccgatctacaaataagactgctcaaatggcatatagactctgtgctgtcactctcattctctcacgatggatcctatttgctatctggtggttgggaaaaagttatgagtttatggcaattggaaacaaactctcaacaattcctgcctcgtttgaacggtattataatcgactgtcaggtattgggacctcaagggaactactactctttaatcctacaaatgactgaaaacaattcaaattctgactaccaatttttacttttgaatgcttctgatttgacctccaaattgtcgattaacgggccattaccggtgttcaatagcaccataaaacacattcagcaaccaatctcggccatgaataccaagaactccaactcaattacctctctcaatcactctaagaagaaacaatctagaaaactaattaaatcgagaagacaagatttcaccactaatgtagaaataaaccctattaacaagaacttgtatttcccacacatttctgctgttcaaatttttgacttctataaaaatgagcaagttaactatcagtatttaacatcaggtgtcaacaattctatgggtaaagttagatttgaactgaatttacaagacccaataataactgatttgaagttcaccaaagatgggcaatggatgattacatacgaaattgagtatccgccaaatgacctcttatcttccaaggacttaactcatatcttgaaattttggaccaaaaacgataatgagacaaattggaatttgaaaacgaaagtaataaatccacacgggataagtgtcccaattaccaagatattgccttcaccaagatcagttaataatagtcaaggctgtttaacggctgacaacaacggtggactgaaattttggtccttcgactctcatgagagcaactggtgcttgaaaaaaatttctttaccaaactttaatcatttcagtaactccgtttctttagcttggtctcaagacgggtctctaatattccatggtttcgatgacaagttgcaaattttagatttcgacacttttaaaaagtttgaatcattggaaaatacaaagacggtcagtgagttcacgttagactctgaaatccaaaccgtcaagttgattaatgacacaaatttaatagtggccaccaggactacattaaacgccatcaacttattgcggggtcaagtcataaatagttttgacttatatccgtttgttaacggagtgtataaaaatggtcacatggataggcttattacttgtgacgaaaggacaggcaacattgccctggttataaatcaacaactaactgatctcgatggcgtaccaactatcaattacaaatcccgtattattatattcgattctgacttatctacaaaattgggtaattttacgcatcatgaatacatatcttggattggttggaattatgatactgatttcatatttttggacatagaatcaacactaggtgttgtcggaaccactgtgaatactcaactatctgatgaagttaataacgaaggaatattggatggcctggtaagtaacaccatcacaacttcggcatccaatagcgatatttttgcagaacaattgcataaactgtcgtctaggggcaaaaaaagtgacactagagataaaaataccaatgataacgacgaagatgaagaagatatcgctttggaatttataaatggcgaaaagaaagataagctagtcaatatgaatagttttacgagcatgtttgacaacattcaaaacgtgcaaatggatacattttttgatcgtgtgatgaaagtattaacatag

SEQ ID NO: 11186 - DNA, 2691 bp, Artificial Sequence
  Description of Artificial Sequence: Synthetic polynucleotide
atgacgcaatccttgggtatcgaacagtataaattaagtgtcgtatctggtgggaaacccgctttgaataatctcagttctgtaaccggcaataagaatatcgcccgcttatctcaagaccaaagaaactatattataccctttaacaatcagatcaaggtgtattctgtggaaactagacaatgtgttaagactttgaagtttgcaaataactccttgttatccggaatatttttgcaagaagaagagaataatgaaagtattgtaaagattttattgggtgatataaccgttccgcaacaagaagacgctcatttgattaccgtattcaccaataatggtcatgtaattgttttaaattataaggggaagttggtcgagtcccctaagcatttcaaaatctctttggcagatgaaaagcttgcaaatgttttccatagcgagggcaactatagaattttgacaacgttcaaggaccctagtcaaaaggcacataactctttgcaatcttacaggttatatgcattaacctttgacgatgctaaaaagcaatttgaagtggctcatcaggcagaatggcacaacgttatcttgagcaatatttcttccaatggtaaattattggcgcatatgtgcaaagacgtctctacaaaagatcacgaacacaaatccatctccgttgtttccctttttgatgattctgtaaatttaagctttcccctcggttccatcctttcttctcagactcaatccttgtcctataacacaaggtacgtttctagcatggccatagacaatatgggtcaacaattggctgttggatttgcctccggagttataagtatcgtaagcttagccgatttgcaaataagattactcaaatggcatatagactctgtgctttctctctctttctctcacgatggatcctatttgttatctggtggttgggaaaaagttatgagtttatggcaattggaaacaaactctcaacaattcttacctcgtttgaacggtattataatcgactgtcaggtattgggacctcaagggaactactactctttaatcttgcaaatgactgaaaacaatagtaattctgactaccaatttttacttttgaatgcttctgatttgacctccaaattgtctattaacgggccattaccggtgttcaatagcaccataaaacacattcagcaaccaatcagtgccatgaataccaagaactccaactctattacctctctcaatcactctaagaagaaacaatctagaaaattgattaaatctagaagacaagatttcaccactaatgtagaaataaaccctattaacaagaacttgtatttcccacacatttctgctgttcaaatttttgacttctataaaaatgagcaagttaactatcagtatttaacatctggtgtcaacaattctatgggtaaagttagatttgaattgaatttacaagacccaataataactgatttgaagttcaccaaagatgggcaatggatgattacatacgaaattgagtatccgccaaatgacctcttatcttccaaggacttaactcatatcttgaaattttggaccaaaaacgataatgagacaaattggaatttgaaaacgaaagtaataaatccacacgggataagtgtcccaattaccaagatattgccttctccaagatctgttaataatagtcaaggctgtttaacggctgacaacaacggtggattgaaattttggtccttcgactctcatgagagcaactggtgcttgaaaaaaatttctttaccaaactttaatcatttcagtaactccgtttctttagcttggtctcaagacgggtctttgatattccatggtttcgatgacaagttgcaaattttagatttcgacacttttaaaaagtttgaatctttggaaaatacaaagacggtcagtgagttcacgttagactctgaaatccaaaccgtcaagttgattaatgacacaaatttaatagtggccaccaggactacattaaacgccatcaacttattgagaggtcaagtcataaatagttttgacttatatccgtttgttaacggagtgtataaaaatggtcacatggataggcttattacttgtgacgaaaggacaggcaacattgccttagttataaatcaacaattgactgatctcgatggcgtaccaactatcaattacaaatcccgtattattatattcgattctgacttatctacaaaattgggtaattttacgcatcatgaatacatatcttggattggttggaattatgatactgatttcatatttttggacatagaatctacattaggtgttgtcggaaccactgtgaatactcaattatctgatgaagttaataacgaaggaatattggatggcttagtaagtaacaccatcacaacttctgcatccaatagcgatatttttgcagaacaattgcataaattatcttctaggggcaaaaaaagtgacactagagataaaaataccaatgataacgacgaagatgaagaagatatcgctttggaatttataaatggcgaaaagaaagataagttggtcaatatgaatagttttacgagcatgtttgacaacattcaaaacgtgcaaatggatacattttttgatcgtgtgatgaaagtattaacatga

SEQ ID NO: 11187 - DNA, 3099 bp, Saccharomyces cerevisiae
atggcctcgtctcttaacgagttaaacttggttcaagtacttgaacaagcaagtaacccacaacatattaggtcagatgttcaaaaattagccgaacaacaactaagacaatgggagactcaagcgggatttcattacttattacagtcaatctaccttaatttatctaattctttacaaattagatggttggcggtaattcaatttaagaacggcgtggataaatactggagatccactagaattaacgctatacctaaagatgaaaaagcctcgataagaggtcgtctttttgaaatgatcgatgaacagaataatcaactttgtattcagaatgcccaagcttccgcaaggattgcaaggctagattttcccgtagagtggccaaccttatttgaggatctagaaaacctattgaacgatgagatcatcagaaaagattcagttaagatttacaatatattgatgcatataaatcaaatcgttaaagtattaggtactgcgagaataggaaggtgccgacccgctatgcaaagtaaagttcctttgatattaccactaattgtcaggatttatttacaatcatttgaagaatggacgacatcctccaatctcaactacgaggatctttccagtttacaagtttcttacctagctttgaaagtgctcagaaggataatttgtgaaggatacgaccgccctcaaaccgatcagtctgtttgcgattttattaaactatccgtttcacactttgagatgttaatttcaaaccatgaaaacttcaaaaagtttgatatttacgaaaagtttatcaaatgcctaggaaagttatatttcaatttagtcactggctctccggctaatttcatattactgccatgctctacgcaaattctaatcacttatactaggctaattttcgataaggcccctaaagtatatagagagaattctgatgtcacgggggacttttgggaacagactgctattagagggcttttaattttgaaaagggtcattaatttcattcacaaaaagggggcaattacgttaaaagcaagaagtgataaactaaccatagatgcttctatcaacaaaatcaacacagaatttctgaatgagaatttgataacaaggttggttgacactttaatggaatggtacttgaggttaagaccaactgaattagaaaattggtttatggatccagaagaatggataaacgaacaaatggccacgagttacgaatatcaaatcagaccatgtgcagagaacgtttttcaagacttaatgaatactttctctgagctgttggttccctacctgttaaagaaaattgaaaatgatgcttcaaagctatcaaactcattagacgattttttaaggaaagacgcaatttatgcaagtttccaattaagtgcatccgctgttagtgaaatggtagattttgacaggttactaattcaggtttttttaccagaagctacaaatacaaacatatcaggcgacgaattaaggattatcagaagaagagttgctttaattataaacgaatggtctactgtgaagtgttcggaagaatctaaaagtttatgttacaagttatttacaaacttcctgacagatgaagacgacaaagttgttttgttaaccacagtccagactgtcagaaccatggttgatgactggaacttcaacaaggatacttttcagccatttttaactgaaaatgttcatttattgttgaggaaaattttaccatctgtgtcgttaaccgagacaaggctatatgttttaaacaccttgagcgatatcataattcaaacaaaacctttaattagcagggatctattagtcgaaattttgcaaatcataccaaacctttgggaaatagcaacaaataatgctagtgaggctattttggcaaacgcattgttaaggttattgagaaatttggtatcatctttgggatcacagtcacatttaacgtgggatatcgccatacctgtggttgcattagcctgtgatccctcttctatgcaatatcagttgttaagcgaagacgggtatgaactatggggcatgcttcttcaaaatttttcatcccacgatcaagagtttgacgataagttcgttgaattggtgccatttctaaagtatggtattgagacacacacagagattctcccaactttacttgaaattatcaaaagttatgctctgattctgaatcctgtggattttttctctaacaacacatttcaagatatttttaaacaaatgtctaaatatcttttaaagttaagggaagattcatttcagttggttttagaaatctgggaaattttgatattatccaatgagtcggattacgaaaatctgttattgcaaaaattctatgaaaccggagtattatcagcattattcgatgccattttcctggaagaagctccttcatcttatttatgctcgcaaatcattcaaatcatcgctagaatatcctacgtgaatccagacgccttaatgacttttttagctacatatcatgacaatctaccaacttctaacgaaaatgcacgcatgccggaatcaataagaaaaattgtgtctaaggatcagacgtatgattccgttgtaaacaagcttttaaccggatggatagtatgttttagagatatctttgatcctaaattcaaaaaagttcacatattaggtatttcaagtttactaaggactggtttagttcctattttgactgagttttcatccatcgcatctttatggatcgaaatgctcgaagaaattaatgaaactaatcgtggggattgcgaaaaataccacttgaatgatattgttacagagcaatcaattgcattccatcctttaactgccgaacaattaagatatcatcaattatgcaaaaacaatgatccagtgcataacattagtttaaaagattttatttcccaatcaatggaatatctagaatcacatttaggagtagaaaggtaccaagaatttttgaagactattaaccctagtttactagagaacttacaaatgtttttatccatccagcctcaagaggctcgtccatga

SEQ ID NO: 11188 - DNA, 3099 bp, Artificial Sequence
  Description of Artificial Sequence: Synthetic polynucleotide
atggcctcttctcttaacgagttaaacttggttcaagtacttgaacaagcaagtaacccacaacatattaggtctgatgttcaaaaattagccgaacaacaattgagacaatgggagactcaagcgggatttcattacttattacagtctatctaccttaatttatctaattctttacaaattagatggttggcggtaattcaatttaagaacggcgtggataaatactggagatccactagaattaacgctatacctaaagatgaaaaagcctctataagaggtcgtctttttgaaatgatcgatgaacagaataatcaactttgtattcagaatgcccaagcttccgcaaggattgcaaggttagattttcccgtagagtggccaaccttatttgaggatttggaaaaccttttgaacgatgagatcatcagaaaagattctgttaagatttacaatatattgatgcatataaatcaaatcgttaaagtattaggtactgcgagaataggaaggtgccgccccgctatgcaaagtaaagttcctttgatattaccattgattgtcaggatttatttacaaagttttgaagaatggacgacatcctccaatctcaactacgaggatctttccagtttacaagtttcttacttggctttgaaagtgctcagaaggataatttgtgaaggatacgaccgccctcaaaccgatcagtctgtttgcgattttattaaactttccgtttctcactttgagatgttaatttccaaccatgaaaacttcaaaaagtttgatatttacgaaaagtttatcaaatgcttaggaaagttatatttcaatttagtcactggctctccggctaatttcatattattaccatgctctacgcaaattttgatcacttatactaggttgattttcgataaggcccctaaagtatatagagagaattctgatgtcacgggggacttttgggaacagactgctattagagggcttttaattttgaaaagggtcattaatttcattcacaaaaagggggcaattacgttaaaagcaagaagtgataaattgaccatagatgcttctatcaacaaaatcaacacagaatttttgaatgagaatttgataacaaggttggttgacactttaatggaatggtacttgaggttaagaccaactgaattagaaaattggtttatggatccagaagaatggataaacgaacaaatggccacgagttacgaatatcaaatcagaccatgtgcagagaacgtttttcaagacttaatgaatactttctctgagttattggttccctacttattaaagaaaattgaaaatgatgcttccaagttatctaactctttagacgattttttaaggaaagacgcaatttatgcaagtttccaattaagtgcatccgctgttagtgaaatggtagattttgacaggttattgattcaggtttttttaccagaagctacaaatacaaacatatctggcgacgaattaaggattatcagaagaagagttgctttaattataaacgaatggtctactgtgaagtgttctgaagaatctaaaagtttatgttacaagttatttacaaacttcttaacagatgaagacgacaaagttgttttgttaaccacagtccagactgtcagaaccatggttgatgactggaacttcaacaaggatacttttcagccatttttaactgaaaatgttcatttattgttgaggaaaattttaccatctgtgtctttaaccgagacaaggttatatgttttaaacaccttgagcgatatcataattcaaacaaaacctttaattagcagggatttattagtcgaaattttgcaaatcataccaaacctttgggaaatagcaacaaataatgctagtgaggctattttggcaaacgcattgttaaggttattgagaaatttggtatcttctttgggatctcagtctcatttaacgtgggatatcgccatacctgtggttgcattagcctgtgatccctcttctatgcaatatcagttgttaagcgaagacgggtatgaattatggggcatgcttcttcaaaatttttcttcccacgatcaagagtttgacgataagttcgttgaattggtgccatttttgaagtatggtattgagacacacacagagattctcccaactttacttgaaattatcaaaagttatgctttgattttgaatcctgtggattttttctctaacaacacatttcaagatatttttaaacaaatgtctaaatatcttttaaagttaagggaagattcttttcagttggttttagaaatctgggaaattttgatattatccaatgagtctgattacgaaaatttattattgcaaaaattctatgaaaccggagtattaagtgcattattcgatgccattttcttggaagaagctccttcttcttatttatgctctcaaatcattcaaatcatcgctagaatatcctacgtgaatccagacgccttaatgacttttttagctacatatcatgacaatttaccaacttctaacgaaaatgcacgcatgccggaaagtataagaaaaattgtgtctaaggatcagacgtatgattccgttgtaaacaagcttttaaccggatggatagtatgttttagagatatctttgatcctaaattcaaaaaagttcacatattaggtatttccagtttattgaggactggtttagttcctattttgactgagttttcttccatcgcatctttatggatcgaaatgctcgaagaaattaatgaaactaatcgtggggattgcgaaaaataccacttgaatgatattgttacagagcaatctattgcattccatcctttaactgccgaacaattaagatatcatcaattatgcaaaaacaatgatccagtgcataacattagtttaaaagattttatttcccaatctatggaatatttggaaagtcatttaggagtagaaaggtaccaagaatttttgaagactattaaccctagtttattggagaacttacaaatgtttttatccatccagcctcaagaggctcgtccatga

SEQ ID NO: 11189 - DNA, 762 bp, Saccharomyces cerevisiae
atggattatagtaactttggaaacagtgccagtaaaaagtttcaagacgatactctaaacagagtaagaaaagagcatgaagaagccttaaaaaagttgcgagaagagaacttcagttcaaacacgtcagaattgggaaacaagaagcactatagagcacaggaaaggatgagttcgccattacatagattgtctcccacaggtaaatcagacgataggaaagtgaagagcccgctagatgataagctaaggaggcaattaagggaaggtaatacgcgactacctcctccaccattttccagctacgggatgccacccaccaaccgatctaatttggatagaataagaagaaggactagctcaccagtaagaactgataaatttgcatcacaaaatgtgatagatgaccaaagattagaaataaaatatttagaacgaatcgtatatgaccaaggcactgtcattgataatctaacatcaagaataacaagactggaatcattcatactgaattcgatctcagacagaggagataaaaattttgcctctctcgaacactcccgctctttttctgggtttccgaccaacaagacgtatggcttacaaatgggtggactgtatgagaatgatatgccctatcgaagaagtagcgacaacattaataaagaaggagcaagagaagatcgatcgtcacaaatccatattgaaaatgaaagtacggaggatatactaaaaatattgtcttcgtcttttcacaattga

SEQ ID NO: 11190 - DNA, 762 bp, Artificial Sequence
  Description of Artificial Sequence: Synthetic polynucleotide
atggattatagtaactttggaaacagtgccagtaaaaagtttcaagacgatactttgaacagagtaagaaaagagcatgaagaagccttaaaaaagttgagagaagagaacttcagtagtaacacgagtgaattgggaaacaagaagcactatagagcacaggaaaggatgagttctccattacatagattgtctcccacaggtaaaagtgacgataggaaagtgaagagcccgttagatgataagttaaggaggcaattaagggaaggtaatacgagattacctcctccaccattttccagctacgggatgccacccaccaacagatctaatttggatagaataagaagaaggactagctctccagtaagaactgataaatttgcatctcaaaatgtgatagatgaccaaagattagaaataaaatatttagaaagaatcgtatatgaccaaggcactgtcattgataatttgacatctagaataacaagattagaatctttcatattgaattccatcagtgacagaggagataaaaattttgcctctctcgaacactcccgctctttttctgggtttccgaccaacaagacgtatggcttacaaatgggtggattgtatgagaatgatatgccctatagaagaagtagcgacaacattaataaagaaggagcaagagaagatagaagttctcaaatccatattgaaaatgaaagtacggaggatatattgaaaatattgtcttcttcttttcacaattga

SEQ ID NO: 11191 - DNA, 1305 bp, Saccharomyces cerevisiae
atgttactgaaaaacttacacagtctcttacaactaccaattttttcgaatggagcagataagggtatagaaccaaactgccctataaacattccattatcatgttccaataaaactgatatagacaactcgtgttgttttgaatatccaggtggaatatttttacaaacccaattctggaattactttccaagcaaaaacgatttaaatgaaactgaattagtgaaggagttagggcctctagattcatttacaattcacggattatggccagataattgtcatggtggctaccaacaattctgtaataggtccttacaaattgacgatgtttactacttattgcatgacaagaaatttaataataatgatacatccctgcaaatatcgggcgaaaagctgcttgaatacctagacttatattggaagagtaataacgggaatcatgagtccttatggatacacgagtttaataaacatggcacgtgcattagcacaattagaccagagtgctatactgagtggggtgctaatagtgttgacagaaaaagagcggtctatgattattttagaataacttataatctattcaagaaattggacacattttcaacactagaaaaaaataatattgtcccaagtgtggacaattcctattctttggagcagatagaggcagcactaagtaaagagtttgaaggaaaaaaagtcttcataggctgtgatagacataattccttaaacgaagtatggtattataaccacttgaagggttcccttttgagcgaaatgtttgtgcccatggactcacttgccattcgaacaaattgtaaaaaagatggtattaagttttttccaaaaggttatgtcccaactttcaggaggagacctaataagggagcaagatacagaggagtcgttcgtctatcaaatattaataatggagatcagatgcaaggctttctaatcaagaatggacactggatgagtcaaggtacaccagcgaattacgagttgattaaatctccctatgggaattactacttgagaactaaccaagggttttgtgacattatttcgtcttcatctaatgaattggtctgcaaattcaggaacattaaggatgcaggtcaattcgattttgatccaacgaaaggaggagacggatatattggttattctggtaactacaactggggcggtgacacctatccaaggagaaggaatcaaagccccattttctctgtagacgatgaacaaaattccaagaaatataagtttaaattaaaattcatcaaaaattaa

SEQ ID NO: 11192 - DNA, 1305 bp, Artificial Sequence
  Description of Artificial Sequence: Synthetic polynucleotide
atgttattgaaaaacttacacagtctcttacaattaccaattttttctaatggagcagataagggtatagaaccaaactgccctataaacattccattaagttgttccaataaaactgatatagacaactcttgttgttttgaatatccaggtggaatatttttacaaacccaattctggaattactttccaagcaaaaacgatttaaatgaaactgaattagtgaaggagttagggcctttggattcttttacaattcacggattatggccagataattgtcatggtggctaccaacaattctgtaataggtccttacaaattgacgatgtttactacttattgcatgacaagaaatttaataataatgatacatccttacaaatatctggcgaaaagcttcttgaatacttggacttatattggaagagtaataacgggaatcatgagtccttatggatacacgagtttaataaacatggcacgtgcattagcacaattagaccagagtgctatactgagtggggtgctaatagtgttgacagaaaaagagcggtctatgattattttagaataacttataatttattcaagaaattggacacattttctacattagaaaaaaataatattgtcccaagtgtggacaattcctattctttggagcagatagaggcagcattaagtaaagagtttgaaggaaaaaaagtcttcataggctgtgatagacataattccttaaacgaagtatggtattataaccacttgaagggttcccttttgagcgaaatgtttgtgcccatggactctcttgccattagaacaaattgtaaaaaagatggtattaagttttttccaaaaggttatgtcccaactttcaggaggagacctaataagggagcaagatacagaggagtcgttcgtttatccaatattaataatggagatcagatgcaaggctttttgatcaagaatggacactggatgagtcaaggtacaccagcgaattacgagttgattaaatctccctatgggaattactacttgagaactaaccaagggttttgtgacattatttcttcttcttctaatgaattggtctgcaaattcaggaacattaaggatgcaggtcaattcgattttgatccaacgaaaggaggagacggatatattggttattctggtaactacaactggggcggtgacacctatccaaggagaaggaatcaaagccccattttctctgtagacgatgaacaaaattccaagaaatataagtttaaattaaaattcatcaaaaattga

SEQ ID NO: 11193 - DNA, 1542 bp, Saccharomyces cerevisiae
atgagtgactattccctgaagcattcggtcactcagtatttggaagaaattcctcaacaagttcaaaataggctttatacctcaccagctacatgtctggctatctatagaattttaccaccactagctaaattttttatcatggcaatggttttcaacgaaaatgaagtacctttgttggatttagataaatgggttaactctaatggtaaattgcagtttcagaatgcaatcaaatcgatgaagtctttgcatcttcttataccaaataaatcatctggtactttgatgatcaacctaaacccaacattcaaaatcagcctgaggaacgcattaacgggtggggaagttcaaaactcattcggtgtggttgtagaggaaaacgtagttagcctggacttgttggatgaatattcagctaataaatgggaaacaatattacatttcatggttggcactcccctcgctaaaatcccatctgaaaaagtactgaaccttttaaaacacagtaaactaatggaagaggtaaactctactggagagttcaaaatcactaatgaaggcttccaatttcttttacaagaaatcaactcccaattatggacattattattgcaatatttaaaaatgatcgaaacgtccaaaatggatttagtcgatgttttacattttattttcatgttaggcgcattggaagttggcaaagcctataaaatcgatgcattaagcgaaacacaaagaattatgttacaagatatgcgagactatggtttggtattccagaagcattcaaatgatagcattttttatccaacaaaattagctttgatgctgacttccgataccaagacaatcagatctgcctccaatgcgatggatagtgtactgagacagaatagagaagagccgtcagtaaatgaagacggcgccaacgggaaatccacaacagatatcactacatcagatgatttgaacaaagcaggtctaaaaaatcaagatatacccgatggctcattgattgtagaaacaaatttcaaaatctattcatattctaattcacctctgcaaattgctgttttgtctctttttgttcatttaaaggcaagatttgtgaatatggtattgggtcaaataacaagggaatccataagaagagcattgaccaatggtatcactgccgaccaaatcattgcctatctggagacacatgcacatcctcaaatgagaaggttggcagaagagaaactagaaaaaaaattagagctggaccccaactgtaaggagcctttacaagttttgcctcctaccgtcgtagatcaaatcagattatggcaattagagttagatagagtcattacatatgaaggttccttatattctgattttgagactagtcaagaatacaacttactaagtaagtacgctcaagatatcggtgttttgttgtggaaagacgacaaaaagaagaaatttttcatctcaaaggaaggtaattctcaagtacttgatttcgctaaaagaaagttgaaaaagaaacaataa

SEQ ID NO: 11194 - DNA, 1542 bp, Artificial Sequence
  Description of Artificial Sequence: Synthetic polynucleotide
atgagtgactattccttgaagcattctgtcactcagtatttggaagaaattcctcaacaagttcaaaataggctttatacctctccagctacatgtttggctatctatagaattttaccaccattggctaaattttttatcatggcaatggttttcaacgaaaatgaagtacctttgttggatttagataaatgggttaactctaatggtaaattgcagtttcagaatgcaatcaaatctatgaagtctttgcatcttcttataccaaataaatcttctggtactttgatgatcaacttgaacccaacattcaaaatcagcttgaggaacgcattaacgggtggggaagttcaaaactctttcggtgtggttgtagaggaaaacgtagttagcttggacttgttggatgaatattctgctaataaatgggaaacaatattacatttcatggttggcactcccctcgctaaaatcccatctgaaaaagtattgaaccttttaaaacacagtaaattaatggaagaggtaaactctactggagagttcaaaatcactaatgaaggcttccaatttcttttacaagaaatcaactcccaattatggacattattattgcaatatttaaaaatgatcgaaacgtccaaaatggatttagtcgatgttttacattttattttcatgttaggcgcattggaagttggcaaagcctataaaatcgatgcattaagcgaaacacaaagaattatgttacaagatatgagagactatggtttggtattccagaagcattctaatgatagcattttttatccaacaaaattagctttgatgttgacttccgataccaagacaatcagatctgcctccaatgcgatggatagtgtattaagacagaatagagaagagccgtctgtaaatgaagacggcgccaacgggaaatccacaacagatatcactacatctgatgatttgaacaaagcaggtttgaaaaatcaagatatacccgatggctctttgattgtagaaacaaatttcaaaatctattcttattctaattctcctttacaaattgctgttttgtctctttttgttcatttaaaggcaagatttgtgaatatggtattgggtcaaataacaagggaatccataagaagagcattgaccaatggtatcactgccgaccaaatcattgcctatttggagacacatgcacatcctcaaatgagaaggttggcagaagagaaattagaaaaaaaattagagttggaccccaactgtaaggagcctttacaagttttgcctcctaccgtcgtagatcaaatcagattatggcaattagagttagatagagtcattacatatgaaggttccttatattctgattttgagactagtcaagaatacaacttattaagtaagtacgctcaagatatcggtgttttgttgtggaaagacgacaaaaagaagaaatttttcatctccaaggaaggtaattctcaagtacttgatttcgctaaaagaaagttgaaaaagaaacaatga

SEQ ID NO: 11195 - DNA, 669 bp, Saccharomyces cerevisiae
atgcacaatcaggaagagtggctagacaaggacaaaactttggtgaacgaagaagaaaatacttgcatcaaccattcttatacaaaaaaggacactaataactatcgggtcggtaaaagcggtattaaggacttgaagaagcctacgaaccagaaggaaattgcgataaaaaatagggagttaacgaaacaacttactcttctcaggcaagaaaataatcacttacagcaggcttgtaaaattctcagcgaaaacaagatcattgagaacagaaaatccatagaaaaatggaggacaatttgtgagatggaactgtcttttattttaaattccactttaatcaaaatcaatagaatgggcggctataaagattttctagaaaaagaaatggaggctaaaaagagaagattggaatatcagattgacaacggtatggaagatcaaatctgtgaaataaaggaaagtgatgactttagacaactttcagaagttgagaaacaagagtgggagagtcaaatgaatgaacagctgaaagagttggaaaaaaaaaaaatagcggagctggaaaaattgaataaggtgctgcatgatagcgaagggaaagattttggaatggctgaactatgcactaggttaaaacttgactacagcttaatctttccacaatga

SEQ ID NO: 11196 - DNA, 669 bp, Artificial Sequence
  Description of Artificial Sequence: Synthetic polynucleotide
atgcacaatcaggaagagtggttagacaaggacaaaactttggtgaacgaagaagaaaatacttgcatcaaccattcttatacaaaaaaggacactaataactatagagtcggtaaaagcggtattaaggacttgaagaagcctacgaaccagaaggaaattgcgataaaaaatagggagttaacgaaacaacttactcttctcaggcaagaaaataatcacttacagcaggcttgtaaaattctcagcgaaaacaagatcattgagaacagaaaatccatagaaaaatggaggacaatttgtgagatggaattatcttttattttaaattccactttaatcaaaatcaatagaatgggcggctataaagattttttggaaaaagaaatggaggctaaaaagagaagattggaatatcagattgacaacggtatggaagatcaaatctgtgaaataaaggaaagtgatgactttagacaactttctgaagttgagaaacaagagtgggagagtcaaatgaatgaacagttgaaagagttggaaaaaaaaaaaatagcggagttagaaaaattgaataaggtgttacatgatagcgaagggaaagattttggaatggctgaattgtgcactaggttaaaacttgactacagcttaatctttccacaatga

SEQ ID NO: 11197 - DNA, 1674 bp, Saccharomyces cerevisiae
atgaagtgccaaacatgtcacttacccctgcaactagacccatctttagaaggtcttagtttaacccaaagaaatttgctactttcaaataattcaattatcactgcaacgaatgaaaatgtcatcagcaacaagggcatcgaagccgcagataattgtgggcctcaaataccgaaggagaggctgaggcgattaggggagattcagaacataaaagacttgaatttaaaagatgataaattaatcactgattcgtttgtttttcttaatcacgatgatgatgataatgctaatattacgagtaatagcagagaggaccagcgttatggaaatgccaacggaaatgataataaaaaagctaatagtgatacttccgatggaaccagtacctttcgagatcatgacgaagaggaacaagaagctacggatgaggacgaaaaccaacaaatacaattgaattccaagactttgtccacacaagtcaacgcaatgactaatgtatttaacattctatcttctcaaacaaacatagactttcctatctgtcaggactgctgtaacatcttgataaacagactaaaaagtgagtatgatgatgcaataaaagagagagatacttacgctcaatttttatcgaagttagagagtcaaaacaaagaaatatcagaaagcaataaagaaaagcagtattcccataatctttcggaaaaagaaaatttgaaaaaggaagaggaaagactcttggatcaattattacgtttggaaatgacagatgatgacttagatggagaactagttcgtttacaagaaaagaaagttcaactggaaaatgagaaactccaaaaactgagtgatcagaatttaatggatttaaataacattcaattcaacaaaaatttacagtcattaaaactgcaatacgaattatccttgaatcaattagataagttgaggaaaatcaatattttcaatgctacattcaaaatctcacatagcggcccctttgccactataaatggattgagattaggcagtataccagaatcagtggtaccttggaaggaaatcaatgcagcactgggccaattgattcttttactggctaccataaacaaaaacctgaagataaatttagtagactacgaattacaaccgatgggttcattttccaaaatcaagaaaagaatggttaacagtgtcgaatataataattccactacgaacgctcccggtgattggttgattctgcctgtctactatgatgagaatttcaatttggggagaatcttccgcaaggaaacgaagtttgataaatcattagaaacaacattagaaataataagcgaaatcactcggcagctttctacgatagcgtcatcatattcatctcaaacactcacaacaagccaagatgaatcttcaatgaataacgcaaatgacgttgaaaatagtacttccattctcgagctaccctatatcatgaataaggacaagattaatggattatccgtcaaattgcatggtagcagtcccaaccttgaatggacaacggctatgaaatttttattaaccaatgtaaagtggttgttagcgttttcttccaatttactatccaagtcaattaccttaagccctacagtgaattacaatgataagaccatcagcggaaactaa

SEQ ID NO: 11198 - DNA, 1674 bp, Artificial Sequence
  Description of Artificial Sequence: Synthetic polynucleotide
atgaagtgccaaacatgtcacttacccttgcaattggacccatctttagaaggtcttagtttaacccaaagaaatttgttactttctaataattctattatcactgcaacgaatgaaaatgtcatcagcaacaagggcatcgaagccgcagataattgtgggcctcaaataccgaaggagaggttgaggagattaggggagattcagaacataaaagacttgaatttaaaagatgataaattaatcactgattcttttgtttttcttaatcacgatgatgatgataatgctaatattacgagtaatagcagagaggaccagcgttatggaaatgccaacggaaatgataataaaaaagctaatagtgatacttccgatggaaccagtacctttagagatcatgacgaagaggaacaagaagctacggatgaggacgaaaaccaacaaatacaattgaattccaagactttgtccacacaagtcaacgcaatgactaatgtatttaacattttatcttctcaaacaaacatagactttcctatctgtcaggactgctgtaacatcttgataaacagattgaaaagtgagtatgatgatgcaataaaagagagagatacttacgctcaatttttatccaagttagagagtcaaaacaaagaaatatctgaaagcaataaagaaaagcagtattcccataatctttctgaaaaagaaaatttgaaaaaggaagaggaaagactcttggatcaattattacgtttggaaatgacagatgatgacttagatggagaattggttcgtttacaagaaaagaaagttcaattggaaaatgagaaactccaaaaattaagtgatcagaatttaatggatttaaataacattcaattcaacaaaaatttacagtctttaaaattacaatacgaattatccttgaatcaattagataagttgaggaaaatcaatattttcaatgctacattcaaaatctctcatagcggcccctttgccactataaatggattgagattaggcagtataccagaatctgtggtaccttggaaggaaatcaatgcagcattgggccaattgattcttttattagctaccataaacaaaaacttgaagataaatttagtagactacgaattacaaccgatgggttctttttccaaaatcaagaaaagaatggttaacagtgtcgaatataataattccactacgaacgctcccggtgattggttgattttacctgtctactatgatgagaatttcaatttggggagaatcttccgcaaggaaacgaagtttgataaatctttagaaacaacattagaaataataagcgaaatcactagacagctttctacgatagcgagttcttattcttctcaaacactcacaacaagccaagatgaatcttctatgaataacgcaaatgacgttgaaaatagtacttccattctcgagttgccctatatcatgaataaggacaagattaatggattatccgtcaaattgcatggtagcagtcccaaccttgaatggacaacggctatgaaatttttattaaccaatgtaaagtggttgttagcgttttcttccaatttattatccaagtctattaccttaagccctacagtgaattacaatgataagaccatcagcggaaactga

SEQ ID NO: 11199 - DNA, 264 bp, Saccharomyces cerevisiae
atgcatccattagtcgatgaattgactctttcacgctacttgacccacggtacttcagttttatcaagttccctttattctgttgctttctttctctttttttttcccaatttcctttttttttgctcttgtcccaatcataaatgggtgagtttaccgtttattggaatggatattttggaagccctttgtttttatagagagggaaaaatacggaatatttttgaaataggtggtctattacttcagagtttttataattaa

SEQ ID NO: 11200 - DNA, 264 bp, Artificial Sequence
  Description of Artificial Sequence: Synthetic polynucleotide
atgcatccattagtcgatgaattgactctttcccgctacttgacccacggtacttctgttttatccagttccctttattctgttgctttctttctctttttttttcccaatttcctttttttttgctcttgtcccaatcataaatgggtgagtttaccgtttattggaatggatattttggaagccctttgtttttatagagagggaaaaataagaaatatttttgaaataggtggtttattacttcagagtttttataattga

SEQ ID NO: 11201 - DNA, 1854 bp, Saccharomyces cerevisiae
atggcagacttgccacagaaggtatctaatttaagcatcaacaacaaagagaatggtggtggtggcggcaaatcatcttatgtcccaccgcacttgagaagtagaggaaaaccatcattcgaaagaagtaccccaaaacaggaagataaggttacgggtggtgattttttcagacgtgctggaaggcaaactgggaacaatggcgggttttttggcttttctaaggaaagaaatggagggacgagtgcgaactataaccgcggaggcagctcaaattacaaatcatctggaaatagatgggtaaatggcaagcatataccggggcctaagaacgcgaaattagaagccgaactgtttggtgtacacgacgatcccgattaccattcatctggtataaagtttgataattacgataatattcccgtagatgcatctggaaaagatgttcctgaacctatactagattttagttctccccctctggatgagctgttaatggaaaatatcaaacttgctagtttcaccaaacctactccagtacaaaaatattctattccaatagttaccaaaggtagggatttgatggcatgcgcacaaacgggctcaggtaagacaggtgggtttttgtttccgctcttcacggagctattcaggtctgggccctctccagtacccgagaaagcacagagcttttattctagaaagggatatccatctgctttagtacttgcaccaactagagaattggctacccaaatttttgaagaagcaagaaaatttacgtatagatcttgggttaggccatgcgttgtttatggtggcgcgccaatcggtaaccagatgagggaggttgaccgcggctgtgacttattggtggctacaccagggcggctgaatgacttattagaacgcggaaaagtttctttggctaatatcaaatacctggtattggatgaggctgatagaatgctagatatgggattcgaaccccaaattcgccatatagttgaagaatgtgatatgccctctgtggaaaatagacagaccttgatgttttccgccacattcccagtagatatccagcatttggcacgcgatttcttagataattatatttttttatcagtaggaagagtcggttccacctcagaaaatatcacgcaaagaatattatatgtcgatgacatggacaaaaagtctgcgttgttagatttactgtctgcagagcataagggattgacattgatttttgttgaaacgaaaagaatggcggatcaactcacagattttttgatcatgcaaaatttcaaagctacagccatacatggtgaccgcacacaggctgaacgtgaacgtgccttatctgctttcaaagctaacgtagctgatatcctggtcgcaacagctgtagcagcgagaggtttggatataccgaatgtcacacatgtcattaattatgatttgccctccgacatcgatgactacgttcacagaattggtagaacaggccgtgctggtaacacaggcgtggctacttcattcttcaatagtaataatcagaatattgtgaagggtttgatggaaattttaaatgaagcgaatcaagaagttcccacgtttttaagtgacctgtcaagacagaattcaagaggtggaagaactaggggaggaggaggttttttcaatagtcgtaataacggttcaagagactaccgtaaacatggtggaaatggctcatttgggagcacgaggccaaggaatactggaacatcaaattggggttcgattggaggtgggtttagaaatgataatgagaaaaacggttacggaaatagcaacgcttcatggtggtaa

SEQ ID NO: 11202 - DNA, 1854 bp, Artificial Sequence
  Description of Artificial Sequence: Synthetic polynucleotide
atggcagacttgccacagaaggtatctaatttaagcatcaacaacaaagagaatggtggtggtggcggcaaatcttcttatgtcccaccgcacttgagaagtagaggaaaaccatctttcgaaagaagtaccccaaaacaggaagataaggttacgggtggtgattttttcagacgtgctggaaggcaaactgggaacaatggcgggttttttggcttttctaaggaaagaaatggagggacgagtgcgaactataaccgcggaggcagcagtaattacaaatcttctggaaatagatgggtaaatggcaagcatataccggggcctaagaacgcgaaattagaagccgaattatttggtgtacacgacgatcccgattaccattcttctggtataaagtttgataattacgataatattcccgtagatgcatctggaaaagatgttcctgaacctatattggattttagttctccccctttggatgagttattaatggaaaatatcaaacttgctagtttcaccaaacctactccagtacaaaaatattctattccaatagttaccaaaggtagggatttgatggcatgcgcacaaacgggcagtggtaagacaggtgggtttttgtttccgctcttcacggagcttttcaggtctgggccctctccagtacccgagaaagcacagagcttttattctagaaagggatatccatctgctttagtacttgcaccaactagagaattggctacccaaatttttgaagaagcaagaaaatttacgtatagatcttgggttaggccatgcgttgtttatggtggcgcgccaatcggtaaccagatgagggaggttgaccgcggctgtgacttattggtggctacaccagggagattgaatgacttattagaacgcggaaaagtttctttggctaatatcaaatacttggtattggatgaggctgatagaatgcttgatatgggattcgaaccccaaattcgccatatagttgaagaatgtgatatgccctctgtggaaaatagacagaccttgatgttttccgccacattcccagtagatatccagcatttggcacgcgatttcttagataattatatttttttaagtgtaggaagagtcggttccaccagtgaaaatatcacgcaaagaatattatatgtcgatgacatggacaaaaagtctgcgttgttagatttattatctgcagagcataagggattgacattgatttttgttgaaacgaaaagaatggcggatcaactcacagattttttgatcatgcaaaatttcaaagctacagccatacatggtgaccgcacacaggctgaacgtgaacgtgccttatctgctttcaaagctaacgtagctgatatcctcgtcgcaacagctgtagcagcgagaggtttggatataccgaatgtcacacatgtcattaattatgatttgccctccgacatcgatgactacgttcacagaattggtagaacaggccgtgctggtaacacaggcgtggctacttctttcttcaatagtaataatcagaatattgtgaagggtttgatggaaattttaaatgaagcgaatcaagaagttcccacgtttttaagtgacttatctagacagaattctagaggtggaagaactaggggaggaggaggttttttcaatagtcgtaataacggttccagagactaccgtaaacatggtggaaatggctcttttgggagcacgaggccaaggaatactggaacaagtaattggggttccattggaggtgggtttagaaatgataatgagaaaaacggttacggaaatagcaacgcttcttggtggtga

SEQ ID NO: 11203 - DNA, 1035 bp, Saccharomyces cerevisiae
atgacattggcagagttgcttggacggtcgagaatagctcaagtagctaacaatcataaaccattgacatacactggcaaaaaatttcatccaacacatcaaatcatcgaaactaagccatcgacactatacagacaagaatgggggttgaaatccgctattccttcgaaaattaaatctcgatatttggtgtacaacgatttggatacgttggaaagaattaccacattcgaacctagaggcggtacgcaatggaataggctaagatttcaagaaatgggagtaccaattgtgtctaatataggcagacaaaatccatttttcaagtacatatctcgtcctgaggatgagtctcatgctaaattgtccttattcaaagaaatgaaaggagatacagatatttcgcctgctgctatgaagaagcgtttgaagaagataacagcactaattagatcgtttcaagatgaatttaaagagtggctggtggaaaatcatccggatgaattgaaattgaattctaataagctggaagactatgtagtgaagtttctaaacaaaaagttggaaacaaaaacgaataaaaaatttaacactgaaatcattggtacaggtggattatcatacagcttgccaggaaagctaaaaaactcaccaaatggtgtcattcaaaggactgtagtacccggtagaatcttgaacgttgttaaggagaacaacgacaataaatggctggcagctattggtgggtttgtggccgatgtggtatttttccaatcaccacctagttcctttaactccatgggagatttcatcagaatgaaaacgttcttgttcgagatcttggaggcatctatggagaaaaatggttctgtttcgatgcacgctagattactcgaaccacaaaatgacaagaccagagaatttttcaataagagaccaatttataaaccattgacctctagaagggcacgtcgaccatcagtgggaaacattcaagaggccaataaccttttgaatataatcaagggaaattga

SEQ ID NO: 11204 - DNA, 1035 bp, Artificial Sequence
  Description of Artificial Sequence: Synthetic polynucleotide
atgacattggcagagttgcttggaagatctagaatagctcaagtagctaacaatcataaaccattgacatacactggcaaaaaatttcatccaacacatcaaatcatcgaaactaagccatctacattgtacagacaagaatgggggttgaaatccgctattccttccaaaattaaatctagatatttggtgtacaacgatttggatacgttggaaagaattaccacattcgaacctagaggcggtacgcaatggaataggttaagatttcaagaaatgggagtaccaattgtgtctaatataggcagacaaaatccatttttcaagtacatatctcgtcctgaggatgagtctcatgctaaattgtccttattcaaagaaatgaaaggagatacagatatttctcctgctgctatgaagaagcgtttgaagaagataacagcattgattagatcttttcaagatgaatttaaagagtggttggtggaaaatcatccggatgaattgaaattgaattctaataagttggaagactatgtagtgaagtttttgaacaaaaagttggaaacaaaaacgaataaaaaatttaacactgaaatcattggtacaggtggattatcttacagcttgccaggaaagttgaaaaactctccaaatggtgtcattcaaaggactgtagtacccggtagaatcttgaacgttgttaaggagaacaacgacaataaatggttggcagctattggtgggtttgtggccgatgtggtatttttccaatctccacctagttcctttaactccatgggagatttcatcagaatgaaaacgttcttgttcgagatcttggaggcatctatggagaaaaatggttctgtttctatgcacgctagattactcgaaccacaaaatgacaagaccagagaatttttcaataagagaccaatttataaaccattgacctctagaagggcacgtagaccatctgtgggaaacattcaagaggccaataaccttttgaatataatcaagggaaattga

SEQ ID NO: 11205 - DNA, 867 bp, Saccharomyces cerevisiae
atgactgccgacaacaatagtatgccccatggtgcagtatctagttacgccaaattagtgcaaaaccaaacacctgaagacattttggaagagtttcctgaaattattccattacaacaaagacctaatacccgatctagtgagacgtcaaatgacgaaagcggagaaacatgtttttctggtcatgatgaggagcaaattaagttaatgaatgaaaattgtattgttttggattgggacgataatgctattggtgccggtaccaagaaagtttgtcatttaatggaaaatattgaaaagggtttactacatcgtgcattctccgtctttattttcaatgaacaaggtgaattacttttacaacaaagagccactgaaaaaataactttccctgatctttggactaacacatgctgctctcatccactatgtattgatgacgaattaggtttgaagggtaagctagacgataagattaagggcgctattactgcggcggtgagaaaactagatcatgaattaggtattccagaagatgaaactaagacaaggggtaagtttcactttttaaacagaatccattacatggcaccaagcaatgaaccatggggtgaacatgaaattgattacatcctattttataagatcaacgctaaagaaaacttgactgtcaacccaaacgtcaatgaagttagagacttcaaatgggtttcaccaaatgatttgaaaactatgtttgctgacccaagttacaagtttacgccttggtttaagattatttgcgagaattacttattcaactggtgggagcaattagatgacctttctgaagtggaaaatgacaggcaaattcatagaatgctataa

SEQ ID NO: 11206 - DNA, 867 bp, Artificial Sequence
  Description of Artificial Sequence: Synthetic polynucleotide
atgactgccgacaacaatagtatgccccatggtgcagtatctagttacgccaaattagtgcaaaaccaaacacctgaagacattttggaagagtttcctgaaattattccattacaacaaagacctaataccaggtctagtgagacgtccaatgacgaaagcggagaaacatgtttttctggtcatgatgaggagcaaattaagttaatgaatgaaaattgtattgttttggattgggacgataatgctattggtgccggtaccaagaaagtttgtcatttaatggaaaatattgaaaagggtttattacatcgtgcattctccgtctttattttcaatgaacaaggtgaattacttttacaacaaagagccactgaaaaaataactttccctgatctttggactaacacatgctgctctcatccattatgtattgatgacgaattaggtttgaagggtaagttggacgataagattaagggcgctattactgcggcggtgagaaaattggatcatgaattaggtattccagaagatgaaactaagacaaggggtaagtttcactttttaaacagaatccattacatggcaccaagcaatgaaccatggggtgaacatgaaattgattacatcttattttataagatcaacgctaaagaaaacttgactgtcaacccaaacgtcaatgaagttagagacttcaaatgggtttctccaaatgatttgaaaactatgtttgctgacccaagttacaagtttacgccttggtttaagattatttgcgagaattacttattcaactggtgggagcaattagatgacctttctgaagtggaaaatgacaggcaaattcatagaatgttgtga

SEQ ID NO: 11207 - DNA, 2094 bp, Saccharomyces cerevisiae
atgtcttccaagcattcagatccattggagagattttataagcaatttcaagcatttgttcaaaataaccctaatgtcatatcggcagctcgagctgccgcacaaataccggaatctgcaaaagctgttgtagtactatccccatattctttacagcatgtgttcccgagagaatgggtaacaaaatcgtataggaaaactatagtcgaacgaccagaaagattattagcaagctcgatgggtatatcagctgcgattacaatgtatccatcccttttcaccttgaaatcctcgcatcaaaggaaaggttcattgatggcacctcatgtgcttaaagttcatggcagtagctggccggctgagttaattgaactttgccaaatggcagatgctaaattgctaaaaggcgaaatcgaagtcccagatacttggaactcaggtgatatatacttgagctcaaagacaattaaagctctacagggaacaattggggccattgaaactggtgttgactcaattttcaaaggaccatctgcagaacatattagtaacagagcttttgttgctatacggcctcctggtcatcattgccactatggtacaccatccggcttttgtctgttaaacaatgcacatgtagccatagaatatgcgtatgatacttacaacgtcacgcatgttgtcgtgcttgatttcgatctacaccacggtgatgggacccaagacatttgctggaaacgtgcgggtttcaaacctgaggaggaacctgaagattcatcttatgatgattttggtaagaaatttgccgaatttcccaaagtcggttatttttctatgcatgatataaattcatttccaacagagtcgggatttgccacaaaggagaacattaaaaatgcatctacctgtatcatgaactctcatgacctaaacatctggaatattcacttatccaaatggacaaccgaagaagaattcaatgtattatacaggacaaaatatagaactttatttgctaaagcagatgaatttttcaggagcgcaaaactagaaatgaatcaacaagggagaccattcaaaggtttggttgtcataagcgcaggtttcgatgcatcagaatttgagcaaacttcaatgcaaaggcatagtgtcaacgttcctacaagtttttatacaacgttcaccaaagatgcattgaaattagcacaaatgcactgtcatggcaaagttttgtctctaatggagggtggatattctgataaagctatatgttctggtgttttcgcacatttgatcggtttacaaaaccaagattgggttaaagaatgggggtctgaacaagtcgttaaagagattgttcgtggttgcaaaccggcttggaaaccctataagacaaaaagagcaaaagatgtcataagaatatgggcagaagaagttatcaggctgggacgagcaatgataccggaattcgatgatatcatttttaaagacgcagttaacagcgcaccttctaattctctactaaaggctactgtcgaaccagcatccacgtcgacaattgctcaaagaataatcagatctcatagaagcaacgcttccccagaaaaagaacttcatgaaaacaagccgagaagcacggaaaaacaggaacaaagggaaattagaagcgataccaaggtcaagcagctctcgtcaaataatagagcagctgaaacccaaattccgtttttgcaacaagaattttccagtgaggatgaagatgaagaatacgtttacgatgaagaattgaacaaaactttcaatcgcacggtggaggatattaccattgatgatatttctagacatttggagaccttagaaattgaaaaaaaaggtgatgaagattcagaccatgagctaaaagaaaaaaattggaaaaactcgcaccaacgccgtctacaaggtaatggaatgtataaaattccctccaatacgaaaccgcatcgcataagacagcctcaaaacgcaaatacaccaacttatgacgatagtgatatatcaatgatttctcatgtttcaagaaaacatacaacaagaagtggtggaagatggtga

SEQ ID NO: 11208 - DNA, 2094 bp, Artificial Sequence
  Description of Artificial Sequence: Synthetic polynucleotide
atgtcttccaagcattctgatccattggagagattttataagcaatttcaagcatttgttcaaaataaccctaatgtcatatctgcagctagagctgccgcacaaataccggaatctgcaaaagctgttgtagtattgtccccatattctttacagcatgtgttcccgagagaatgggtaacaaaaagttataggaaaactatagtcgaaagaccagaaagattattagcaagcagtatgggtatatctgctgcgattacaatgtatccatcccttttcaccttgaaatcctctcatcaaaggaaaggttctttgatggcacctcatgtgcttaaagttcatggcagtagctggccggctgagttaattgaactttgccaaatggcagatgctaaattgttgaaaggcgaaatcgaagtcccagatacttggaacagtggtgatatatacttgagctctaagacaattaaagctttacagggaacaattggggccattgaaactggtgttgacagtattttcaaaggaccatctgcagaacatattagtaacagagcttttgttgctataaggcctcctggtcatcattgccactatggtacaccatccggcttttgtcttttaaacaatgcacatgtagccatagaatatgcgtatgatacttacaacgtcacgcatgttgtcgtgcttgatttcgatttacaccacggtgatgggacccaagacatttgctggaaacgtgcgggtttcaaacctgaggaggaacctgaagattcttcttatgatgattttggtaagaaatttgccgaatttcccaaagtcggttatttttctatgcatgatataaattcttttccaacagagagtggatttgccacaaaggagaacattaaaaatgcatctacctgtatcatgaactctcatgacttgaacatctggaatattcacttatccaaatggacaaccgaagaagaattcaatgtattatacaggacaaaatatagaactttatttgctaaagcagatgaatttttcaggagcgcaaaattagaaatgaatcaacaagggagaccattcaaaggtttggttgtcataagcgcaggtttcgatgcatctgaatttgagcaaacttctatgcaaaggcatagtgtcaacgttcctacaagtttttatacaacgttcaccaaagatgcattgaaattagcacaaatgcactgtcatggcaaagttttgtctttgatggagggtggatattctgataaagctatatgttctggtgttttcgcacatttgatcggtttacaaaaccaagattgggttaaagaatgggggtctgaacaagtcgttaaagagattgttcgtggttgcaaaccggcttggaaaccctataagacaaaaagagcaaaagatgtcataagaatatgggcagaagaagttatcaggttaggaagggcaatgataccggaattcgatgatatcatttttaaagacgcagttaacagcgcaccttctaattctttattgaaggctactgtcgaaccagcatccacgagtacaattgctcaaagaataatcagatctcatagaagcaacgcttccccagaaaaagaacttcatgaaaacaagccgagaagcacggaaaaacaggaacaaagggaaattagaagcgataccaaggtcaagcagctctcttccaataatagagcagctgaaacccaaattccgtttttgcaacaagaattttccagtgaggatgaagatgaagaatacgtttacgatgaagaattgaacaaaactttcaatcgcacggtggaggatattaccattgatgatatttctagacatttggagaccttagaaattgaaaaaaaaggtgatgaagattctgaccatgagttgaaagaaaaaaattggaaaaactctcaccaacgccgtttacaaggtaatggaatgtataaaattccctccaatacgaaaccgcatcgcataagacagcctcaaaacgcaaatacaccaacttatgacgatagtgatatatccatgatttctcatgtttctagaaaacatacaacaagaagtggtggaagatggtga

SEQ ID NO: 11209 - DNA, 3387 bp, Saccharomyces cerevisiae
atgacagataatttgaccacaactcatggtggtagtaccacccttgaattgttggcgcagtacaatgatcatagatccaaaaaggacaaatctatagaacatatagaaaaaggaacatgttcaggaaaagaaagaaatccgtcctatgatgaaatttttacggaaaacattaagctaaagctacaagtccaagaatatgaaactgaaattgagagtttggaaaaggttattgatatgttacaaaaaaacagagaagcttccttagaagttgtgcttgagcaagttcaaaatgactcaagagattcatacgttaacgatcaatcatttgtgttacccccaagatctgctgaaaggaaagcgcatatcaagagtcttaatttgccaataccgacattgtcccctccattgcaacaaggttcagacgttgcacttgaaacaagtgtaacgcctacagtacctcaaataggtgttacatcaaatacttcaataagtaggaagcatttacagaacatgatactaaacgatgaaatagaagcaaatagtagcttctcatctcccaaaattatcaatagatctgtctcaagccctacaaaaatacattcagaacagttggctagcccagctgcctctgttacctatacgacgtctaggataaccataaaatcacctaataaaggttcgaaatctccattgcaagaacgtttgcgttcccctcaaaatcctaacagaatgacggctgttatcaacaaccatttgcattctccattaaaggccagtacctctaataatttagatgagctgactgaaagtaaaagtcaacaactaactaatgacgcgatacaaaaaaatgaccgcgtttattcttctataacatcctctgcatacactactggaactcctacttcagcagccaaaagtccatcatcccttttggaagtcaaggagggtgaaaacaaggctttgggtttctctccagcatctaaagaaaaacttgacgacttcacccaattacttgactcctcatttggcgaagaggatctagtcaatacggacagtaaagatcctctgtccataaaatccacgattaacgaatctttacccccacctccagcgcctccaacttttttctcacctacttctagtggaaatataaaaaactctactcctttatcaagccatttggcttctccggttatcttgaataaaaaggatgataattttggtgctcaaagtgcaaaaaatttaaagaaacctgtgttaacttcatcactccccaatctttctacaaaattgtcaacaacaagtcaaaatgcttctcttcctccaaatcctcccgtggaaagttcatcaaaacaaaaacaacttggagaaacggcatccatccattcaaccaataccttgaatacatttagctcaacaccccaaggttcgttgaagacacttagaagacctcatgcaagtagcgtgagcaccgtgaagtctgtggcccaaagtcttaagtcggatattccattattcgttcaaccggaggattttggcactatccagattgaagtactgagcacattgtacagggataatgaagatgatttatccattttaattgcaatcatagacaggaaatccggtaaggagatgtttaaattttcaaaatctattcataaagttcgcgaattagatgtatatatgaaatcacatgttcccgatttaccattgcccacgttacctgatagacaattatttcagactttatcacctacaaaagtggatacgcgaaagaacatattgaatcagtattatacaagcatattcagtgtccctgaatttcccaaaaatgttggtttaaaaatcgcccaatttattagtacagatacagtaatgacacctccaatgatggatgataatgtgaaagacggatcacttttgctgagaagaccaaagactctaacaggtaatagtacatggagagttcggtacggtattttgcgcgatgatgttttacaattgtttgacaaaaatcagttgactgaaactattaaattgagacaatcttctatagaacttatacccaatctccctgaagatagatttggaacgagaaatgggtttttgatcactgagcataagaaaagcggactgtcaacctcaacaaagtattatatttgtactgaaacgtcgaaggaacgtgaattatggctttctgcgtttagtgattacattgatccttcacaaagtttatcgttatctagctcgaggaatgcaaacgatactgattctgcatctcacttgagcgcaggaacacaccattctaaatttggaaacgcaactatctcagcaaccgatactccatcatatgtcactgatttgacccaagaatataataataataacaatattagtaatagtagcaataacattgctaatagcgatggtattgactcaaacccatcttctcactctaacttcctagcaagttcaagcgggaatgcagaggaggagaaggatagtaggagagccaaaatgagaagtttattcccttttaaaaaattaaccggcccggcgagtgcaatgaaccatataggtattacaatttcaaatgattcggattctccaacatctcctgactctatcattaagtcaccaagcaaaaaattaatggaagtatcctcttcgtcaaattcttctacgggtccacatgtgtccactgcaatatttggctcgtcactagaaacgtgtttaagattgagttcgcataagtaccaaaacgtttacgatttaccgagtgtagtttatcgttgcttagagtatctttacaaaaaccgtggtatccaggaagaaggcatatttagactaagcgggtccagtacagttatcaaaactttacaagaaaggtttgataaagagtacgatgtagatttatgtcggtacaatgaaagtattgaagctaaagatgatgaggcatctccaagtctttacattggtgtgaatactgtaagtgggttactaaagttgtacttgagaaagttgccccatttattatttggtgacgaacaatttttgtcgtttaaaagagtagttgatgaaaatcataataatcctgttcaaatatcattggggtttaaggaacttattgaatctggcctagttcctcacgctaacctatcgttgatgtatgctctttttgaactgctggtaaggatcaatgagaatagtaagtttaataagatgaatctaagaaatttatgcatcgtgttttccccaactctaaatattccaattagtatgcttcaaccattcatcactgactttgcgtgtatatttcagggtggtgaaccagttaaagaagaggaaagggagaaagtagatatacatattcctcaggtttga

SEQ ID NO: 11210 - DNA, 3387 bp, Artificial Sequence
  Description of Artificial Sequence: Synthetic polynucleotide
atgacagataatttgaccacaactcatggtggtagtaccacccttgaattgttggcgcagtacaatgatcatagatccaaaaaggacaaatctatagaacatatagaaaaaggaacatgttctggaaaagaaagaaatccgtcctatgatgaaatttttacggaaaacattaagttgaagttacaagtccaagaatatgaaactgaaattgagagtttggaaaaggttattgatatgttacaaaaaaacagagaagcttccttagaagttgtgcttgagcaagttcaaaatgacagtagagattcttacgttaacgatcaaagttttgtgttacccccaagatctgctgaaaggaaagcgcatatcaagagtcttaatttgccaataccgacattgtcccctccattgcaacaaggttctgacgttgcacttgaaacaagtgtaacgcctacagtacctcaaataggtgttacaagtaatacttccataagtaggaagcatttacagaacatgatattaaacgatgaaatagaagcaaatagtagcttcagttctcccaaaattatcaatagatctgtctccagccctacaaaaatacattctgaacagttggctagcccagctgcctctgttacctatacgacgtctaggataaccataaaatctcctaataaaggttccaaatctccattgcaagaacgtttgcgttcccctcaaaatcctaacagaatgacggctgttatcaacaaccatttgcattctccattaaaggccagtacctctaataatttagatgagttaactgaaagtaaaagtcaacaattgactaatgacgcgatacaaaaaaatgaccgcgtttattcttctataacatcctctgcatacactactggaactcctacttctgcagccaaaagtccatcttcccttttggaagtcaaggagggtgaaaacaaggctttgggtttctctccagcatctaaagaaaaacttgacgacttcacccaattacttgactcctcttttggcgaagaggatttggtcaatacggacagtaaagatcctttatccataaaatccacgattaacgaatctttacccccacctccagcgcctccaacttttttcagtcctacttctagtggaaatataaaaaactctactcctttatccagccatttggcttctccggttatcttgaataaaaaggatgataattttggtgctcaaagtgcaaaaaatttaaagaaacctgtgttaacttcttctctccccaatctttctacaaaattgagtacaacaagtcaaaatgcttctcttcctccaaatcctcccgtggaaagttcttctaaacaaaaacaacttggagaaacggcatccatccattctaccaataccttgaatacatttagctctacaccccaaggttctttgaagacacttagaagacctcatgcaagtagcgtgagcaccgtgaagtctgtggcccaaagtcttaagagtgatattccattattcgttcaaccggaggattttggcactatccagattgaagtattgagcacattgtacagggataatgaagatgatttatccattttaattgcaatcatagacaggaaatccggtaaggagatgtttaaattttccaaatctattcataaagttcgcgaattagatgtatatatgaaatctcatgttcccgatttaccattgcccacgttacctgatagacaattatttcagactttatctcctacaaaagtggatacgagaaagaacatattgaatcagtattatacaagcatattcagtgtccctgaatttcccaaaaatgttggtttaaaaatcgcccaatttattagtacagatacagtaatgacacctccaatgatggatgataatgtgaaagacggatctcttttgttaagaagaccaaagactttgacaggtaatagtacatggagagttagatacggtattttgcgcgatgatgttttacaattgtttgacaaaaatcagttgactgaaactattaaattgagacaatcttctatagaacttatacccaatctccctgaagatagatttggaacgagaaatgggtttttgatcactgagcataagaaaagcggattatctacctctacaaagtattatatttgtactgaaacgtccaaggaacgtgaattatggctttctgcgtttagtgattacattgatccttctcaaagtttatctttatctagcagtaggaatgcaaacgatactgattctgcatctcacttgagcgcaggaacacaccattctaaatttggaaacgcaactatctctgcaaccgatactccatcttatgtcactgatttgacccaagaatataataataataacaatattagtaatagtagcaataacattgctaatagcgatggtattgactccaacccatcttctcactctaacttcttggcaagtagtagcgggaatgcagaggaggagaaggatagtaggagagccaaaatgagaagtttattcccttttaaaaaattaaccggcccggcgagtgcaatgaaccatataggtattacaatttctaatgattctgattctccaacatctcctgactctatcattaagtctccaagcaaaaaattaatggaagtatcctcttcttccaattcttctacgggtccacatgtgtccactgcaatatttggctcttctttggaaacgtgtttaagattgagttctcataagtaccaaaacgtttacgatttaccgagtgtagtttatcgttgcttagagtatctttacaaaaaccgtggtatccaggaagaaggcatatttagattgagcgggtccagtacagttatcaaaactttacaagaaaggtttgataaagagtacgatgtagatttatgtcgttacaatgaaagtattgaagctaaagatgatgaggcatctccaagtctttacattggtgtgaatactgtaagtgggttattgaagttgtacttgagaaagttgccccatttattatttggtgacgaacaatttttgagttttaaaagagtagttgatgaaaatcataataatcctgttcaaatatctttggggtttaaggaacttattgaatctggccttgttcctcacgctaacttatctttgatgtatgctctttttgaattattggtaaggatcaatgagaatagtaagtttaataagatgaatttaagaaatttatgcatcgtgttttccccaactttgaatattccaattagtatgcttcaaccattcatcactgactttgcgtgtatatttcagggtggtgaaccagttaaagaagaggaaagggagaaagtagatatacatattcctcaggtttga

SEQ ID NO: 11211 - DNA, 1191 bp, Saccharomyces cerevisiae
atgattacttcaattgacatagcagatgtaacttattctgccaaaccaagaattttggtgccttataaaacccaatgggaagtcgccagtcatcttcctgaatatcgcaaactggcagaaagggtagaattctataaatatgagatgtccacaaaggatgattttgttaaatttttggaaactcatagaataaacggcttttggctcactgaggagtttttcactgtgttaggaaacccttcgagttatattgaattcttccccgcatctttaaaagtaatccttgtaccatgggtcggctgtgactttattgacggtaagttattaagatcgaaaggtatcactttatgcaacattggaccacatgctgctgaccatgtcacagaattggctattttcctagcaattagctgctttagaatgacttcattttgggaatattgttttaaatacgtggaaaatggtaatgttgaacagtgtaagaaatatatctctagtgactcgtatgaaattgttacagatagttaccacggtcaggaaatgaaatttccctctcgaacagacaaatgcaagcctaacaaggataggaaagtggtacatttagcagaaaagtacacggttggcgggaaaaaaatggaatctccaatgaataaaaaagttctaatattggggtttggctccatcggacaaaatatagggtctaacttgcacaaagtgttcaacatgagcattgaatactacaaaaggaccggtcccgtccaaaagagtctacttgattacaacgctaagtaccattctgatctagatgatccaaatacttggaagaatgcggatttgatcattttggccttgcccagtacggcctctacaaacaatattatcaatcgtaaaagtttggcctggtgtaaagatggtgtcaggatagttaacgttgggagaggcacatgcatagatgaagatgtgctactagacgctcttgaatctggaaaagtggcaagctgtggtctcgatgtgtttaaaaatgaggaaacacgcgttaagcaagagttacttcgcagatgggatgttacagctttgccacatatcggcagcacagttgccgacatggtcataaagcagacactcatcacactcgagaatgtgcaggacatatttgtcgagggaggtgatggtaagtatgtgctcaactga

SEQ ID NO: 11212 - DNA, 1191 bp, Artificial Sequence
  Description of Artificial Sequence: Synthetic polynucleotide
atgattacttctattgacatagcagatgtaacttattctgccaaaccaagaattttggtgccttataaaacccaatgggaagtcgccagtcatcttcctgaatatcgcaaattggcagaaagggtagaattctataaatatgagatgtccacaaaggatgattttgttaaatttttggaaactcatagaataaacggcttttggctcactgaggagtttttcactgtgttaggaaacccttctagttatattgaattcttccccgcatctttaaaagtaatccttgtaccatgggtcggctgtgactttattgacggtaagttattaagaagtaaaggtatcactttatgcaacattggaccacatgctgctgaccatgtcacagaattggctattttcttggcaattagctgctttagaatgacttctttttgggaatattgttttaaatacgtggaaaatggtaatgttgaacagtgtaagaaatatatctctagtgactcttatgaaattgttacagatagttaccacggtcaggaaatgaaatttccctctcgcacagacaaatgcaagcctaacaaggataggaaagtggtacatttagcagaaaagtacacggttggcgggaaaaaaatggaatctccaatgaataaaaaagttttgatattggggtttggctccatcggacaaaatatagggtctaacttgcacaaagtgttcaacatgagcattgaatactacaaaaggaccggtcccgtccaaaagagtttacttgattacaacgctaagtaccattctgatttggatgatccaaatacttggaagaatgcggatttgatcattttggccttgcccagtacggcctctacaaacaatattatcaatcgtaaaagtttggcctggtgtaaagatggtgtcaggatagttaacgttgggagaggcacatgcatagatgaagatgtgcttttggacgctcttgaatctggaaaagtggcaagctgtggtctcgatgtgtttaaaaatgaggaaacacgcgttaagcaagagttacttcgcagatgggatgttacagctttgccacatatcggcagcacagttgccgacatggtcataaagcagacactcatcacactcgagaatgtgcaggacatatttgtcgagggaggtgatggtaagtatgtgctcaactga

SEQ ID NO: 11213 - DNA, 1185 bp, Saccharomyces cerevisiae
atgagtcagtttggcacgacagatatcgtttccggttcagaaacaccaccttattctggggcaagttaccaggacgcccaggatgacaatacccatccacattcatcagacgccggtgcagagaagttcagtgcaggcagtggaagcgagtcgcatactgaatcctcgagaagtgatgatgaggattctcaagcaaaaacaaagatggtggataatattaccatcttaaaatatatattggattctctatctggtagagacaaattagccaaaattatcaaatacgctctggatatattaaaactgtttatcgaaaagtctaagcgaaatttaactgttttggacccttccgtattaacgtactataccaagattttgaaaaatctgactgtaaaagtcgcactaaggcatccaatcacggtaattaaagtacttctcctgtctcttttgagaaattttgacaagaaaattgattttatcagtcaacaattaagtacttttagatatattttaaggtttggcggcacaccattccgagtgtgcagtttcttggggaaattcaataaaaccagaaagtgcaactttcaaattgaccaaattaagaaaatatggtttaatgaagcttcattgagagaatttttggacttgtattatggtatctttgatgaattagacttgctatacaaattgaaaatatggacaaataaatcattctattcctttgtcagtagacaagagtctcttgcatggcaatacgacattcttttaagcttgaaggaccattggctcaacctgcaaagcttacagaagagacaattagaattggaagtgcaactaaaagttcaaaataacgcgttactactctcacccatactgatgcatcaggcccataaagacgatggctcacaatcgccaattaggaaacagttgttaaatgacctaaatgttaataacgacgcagaggtgttaatacacaaacaactaaaggccatcaaggatgaaaagacacttgtttatttagatattgcaagattatcgtttgattgcatggctaatacatcagatattctaaatttaaaaactccaaagggaacgtatgccgttctgtccctgggatccggcttaactggactggttaaactttggataacaacaaagaggtcactttgctcttcaaaagattga

SEQ ID NO: 11214 - DNA, 1185 bp, Artificial Sequence
  Description of Artificial Sequence: Synthetic polynucleotide
atgagtcagtttggcacgacagatatcgtttccggttctgaaacaccaccttattctggggcaagttaccaggacgcccaggatgacaatacccatccacattcttctgacgccggtgcagagaagttcagtgcaggcagtggaagcgagtctcatactgaatccagcagaagtgatgatgaggattctcaagcaaaaacaaagatggtggataatattaccatcttaaaatatatattggattctttatctggtagagacaaattagccaaaattatcaaatacgctttagatatattaaaattatttatcgaaaagtctaagagaaatttaactgttttggacccttccgtattaacgtactataccaagattttgaaaaatttaactgtaaaagtcgcattaaggcatccaatcacggtaattaaagtacttctcttatctcttttgagaaattttgacaagaaaattgattttatcagtcaacaattaagtacttttagatatattttaaggtttggcggcacaccattcagagtgtgcagtttcttggggaaattcaataaaaccagaaagtgcaactttcaaattgaccaaattaagaaaatatggtttaatgaagcttctttgagagaatttttggacttgtattatggtatctttgatgaattagacttgttgtacaaattgaaaatatggacaaataaatctttctattcctttgtcagtagacaagagtctcttgcatggcaatacgacattcttttaagcttgaaggaccattggctcaacttacaaagcttacagaagagacaattagaattggaagtgcaattgaaagttcaaaataacgcgttacttctctctcccatattaatgcatcaggcccataaagacgatggctctcaatctccaattaggaaacagttgttaaatgacttgaatgttaataacgacgcagaggtgttaatacacaaacaattgaaggccatcaaggatgaaaagacacttgtttatttagatattgcaagattatcttttgattgcatggctaatacatctgatattttgaatttaaaaactccaaagggaacgtatgccgttttatccttgggatccggcttaactggattggttaaactttggataacaacaaagaggagtctttgctcttctaaagattga

SEQ ID NO: 11215 - DNA, 1002 bp, Saccharomyces cerevisiae
atggaaacaggacctcattacaactactacaaaaatcgcgaattgtccatcgttctggctccattcagcggcggtcagggtaagcttggtgtcgagaagggccctaaatacatgcttaagcatggtctgcaaacaagcatagaggatttgggctggtctacggaattagagccctcaatggacgaggcccaatttgtgggaaagttgaaaatggagaaggactccacaactgggggttcctctgttatgatagacggtgtcaaggctaaaagagcagatttggttggtgaagccaccaagttggtgtacaactccgtgtcgaaagtggtccaggcgaacagattccccttgaccttgggtggtgatcattcaatagccattggtactgtatccgcggttttggacaaataccccgatgctggtcttttatggatagacgcccacgctgatataaacaccatagaaagcaccccctctggaaacttgcacggctgtcccgtgtcattcctaatgggtttgaacaaggatgtcccacattgtcccgagtcgctcaaatgggttccaggcaacttgagcccaaaaaagatcgcgtatattgggttgagagatgttgatgccggagaaaagaaaatcttgaaagatctgggtatcgccgccttttccatgtaccacgttgacaaatacggcatcaacgctgtcattgaaatggcaatgaaagccgtgcacccagaaacaaacggtgaaggtcccattatgtgctcctatgacgtcgatggtgtagacccattatacattcctgctacaggtactccagtgagaggtgggttgaccttgagagaaggtcttttcttggtggaaagattggccgaatccggtaatttaattgcgctagacgttgttgaatgtaaccctgatctggctattcatgatatccatgtttcaaacaccatctctgcaggttgcgccattgcaaggtgtgcattgggtgaaaccttattgtag

SEQ ID NO: 11216 - DNA, 1002 bp, Artificial Sequence
  Description of Artificial Sequence: Synthetic polynucleotide
atggaaacaggacctcattacaactactacaaaaatcgcgaattgtccatcgttttggctccattcagcggcggtcagggtaagcttggtgtcgagaagggccctaaatacatgcttaagcatggtttacaaacaagcatagaggatttgggctggtctacggaattagagccctctatggacgaggcccaatttgtgggaaagttgaaaatggagaaggactccacaactgggggttcctctgttatgatagacggtgtcaaggctaaaagagcagatttggttggtgaagccaccaagttggtgtacaactccgtgtctaaagtggtccaggcgaacagattccccttgaccttgggtggtgatcattccatagccattggtactgtatccgcggttttggacaaataccccgatgctggtcttttatggatagacgcccacgctgatataaacaccatagaaagcaccccctctggaaacttgcacggctgtcccgtgtctttcttaatgggtttgaacaaggatgtcccacattgtcccgagtctctcaaatgggttccaggcaacttgagcccaaaaaagatcgcgtatattgggttgagagatgttgatgccggagaaaagaaaatcttgaaagatttaggtatcgccgccttttccatgtaccacgttgacaaatacggcatcaacgctgtcattgaaatggcaatgaaagccgtgcacccagaaacaaacggtgaaggtcccattatgtgctcctatgacgtcgatggtgtagacccattatacattcctgctacaggtactccagtgagaggtgggttgaccttgagagaaggtcttttcttggtggaaagattggccgaatccggtaatttaattgcgttggacgttgttgaatgtaaccctgatttggctattcatgatatccatgtttctaacaccatctctgcaggttgcgccattgcaaggtgtgcattgggtgaaaccttattgtga

SEQ ID NO: 11217 - DNA, 3672 bp, Saccharomyces cerevisiae
atgaagttcggaaaaacctttgccaatcatcgcattccagagtggtcaagtcaatatgttggctacaagtcgttgaagaaaatgattaaagaaattacaagacttcaagaagacatatatagggcacataacaagaatagctatgatgaaggcaggccaccaacaaaaatgagagattcatctaatagtgctcaaaattatttggactctccaaaaatccaaaagttattggcgtcgtttttctttgcagttgacagggatattgagaaggttgatacattttacaattcccagtatgcggaatataagaaaagatttgagagattgctttcttctaatcaattcaatgagataaaatcaacattagtggtcgatgccaacaaagaagatgcagtagcgcaaaccttactcacaaaggatacgagagagatgaatatgcttttaaagggaacaagtcaagccagccgtctatcttaccataaagatgacttaattgaaattcagtctatcttagctgagttaagaaaacaatttagaaacttaaagtggtacgctgaactaaataagagagcttttggtaagattttaaagaaactggataaaaaagtcggcacaaatcagcaaatgtcaactatgaaaactagaatcttgccgttacaatttgctaatgattctcttattaccaaagatttgagtttgctaaaaactatctgggaacaagtgacgttcaggataaattcttacgagagagtaatgaggagtacctcgccgaacgcaaatgctaatgataatacagaattctttaagattatttgcgtttttatagaagaagatgatagcaaaggattgattagagagctaacaaacctatattcggaattgtctttgattccaacaagaattatgataagtgttttaaacaaggcagcactgtctaaatcactggcatgtattgatgctatcttaaaggttattccgtctctaaatgactcggaagatattaacagaagaaattttttccatcatcacataattgcaatcgggaagttaatcagaaaacaggaaattttaagtaggaaaaagaagtcacaaccctcaaaatatactaatagtgagggagaaattgtaacagatttaagaaccctgcatacgaccctatctgccccggcagaatcagatagcattacagaggaggaaaaaagttcggcctgtacactctcttatattttagaggagttaccaattcatttaagaccatgcctttttcagcatgataattacaagagaacgcccttgcattattcttgccagtatggcttatctgaagttacgaagttgattatcaagttaatgaaagaatggaatatctggaatgaaatccctattgatgacgtttccgcgttcggagatgccgaatcattgacacctttacatttatgtgtgttgggtgctcatcccaaaacaacagaagtcttattgcaatctttggatccgaacgtgaaattaaaaagttcaagtttgttacatttggccactgagtggaataactatccccttttacatgttctcctatcatcaaaaaggtttgatattaattatcaagacaacgaattacatgaaacaccgctatatcttgcttgtagattaaattttttcgaagctgctgtgtgtttgttgtacaatggagccgaccttgaaataagagaaaaactttttggctggacagctatcttcgttgcagcagcagaagggtttacggacattgtaaagctcttgatagccaacaacgcgaactttgatattgaagatgaaggtgggtggacgccgatggagcacgcggtattgcgcggtcatttgcacattgctgatatggttcaaatcagagacgaactggtcacgcatccccattcacagttgaacagtggtagcgaagagaaagaaccactaaacgaaattagtgccggagaattaaatgagagaaatgaaaatggaaacggaggtaataaagggtccttgggaaaactggccggaccaataaagtcatatggacacagattcctggataataatgaatcacttatactaataacattgggaagtaatgacacaagaaacaaaagcccttcaatttcattaagctcggaagcactagcaaaagttattgggttggaaacagattgtgcattatcgttagtaatttcatgcaatgattcaattgataaatcttctgtaatcttagatttaccattagatgataatgtggacgcagtagacttcaaagtgcctttcaaagttgattattctcatacattatattttgatattgtgccaacatatggaacacgctcgttggagacccataatagaatagattgtcaaaaaaataacaataattacgtaatggcaaggggtgtttccatgttgaataagtcgtacagctcagtgggagttaatagaagtatattaaatggtagcgtgacggtccccatcatcgctaatcatacactggagatacttgggacgctgaaatttgaatatattattatcacaccatttgaacatccacaactgcccttagaaagaacagaaacgtactggaaatccttagtgtccactcgtgttataggacatagaggcctgggtaaaaataatcctaataaatcattacaaattggagagaacacagtcgagtctttcatcatggcagcctcattgggagcatcgtatgtagagtttgatgttcagttgacgaaggataacgtaccagtggtatatcacgattttctcgtagctgaaacaggtgtcgatatccccatgcatgaattgacgctggaacagtttttagatttgaacaatgccgataaagagcacattcaacgtggagcaggtcactcacctcatcatgtaaatggagcagatacagcactacaaaaatatagagggcgttcggtagatgattcagacgttagtacattgaggagagcttgggatttacacgacaacgacccgaatgggaagtccaacaatgctcattggtctgacaatcgaatgaggctaaccaaaacatttaaaaagaacaattttaagggaaacgctagaggacattcaatagcttcatcatttgttaccttgaaagaactattcaagaaaatccctgccaacgttgggtttaacatagaatgtaagtttcccatgcttgatgaggcagaagaggaagagttagggcaaataatgatggaaatgaaccattgggttgacaccgtgttaaaagtagtttttgacaatgcgaatggtagggacatcattttttcgtcatttcatccggatatttgcatcatgctttcgttaaagcaaccggttattccgatcttgttcctgacggaaggtggaagtgaacagatggccgatttgagagcctcatcgttacaaaacggtataagatttgctaagaagtggaatttattggggattgtatctgctgcagcacccattttaaaggccccacggttggtgcaagtggttaagtctaatgggctggtatgtgtcacttacggtgtggacaacaatgatcccgaaaatgccagtatacaaattgaagcaggtgtagatgccgtgatcgtcgatagtgtattggcaattagacgtgggttaaccaaaaagaatgaaaagtaa

SEQ ID NO: 11218 - DNA, 3672 bp, Artificial Sequence
  Description of Artificial Sequence: Synthetic polynucleotide
atgaagttcggaaaaacctttgccaatcatcgcattccagagtggtctagtcaatatgttggctacaagtctttgaagaaaatgattaaagaaattacaagacttcaagaagacatatatagggcacataacaagaatagctatgatgaaggcaggccaccaacaaaaatgagagattcttctaatagtgctcaaaattatttggactctccaaaaatccaaaagttattggcgtcttttttctttgcagttgacagggatattgagaaggttgatacattttacaattcccagtatgcggaatataagaaaagatttgagagattgctttcttctaatcaattcaatgagataaaatctacattagtggtcgatgccaacaaagaagatgcagtagcgcaaaccttactcacaaaggatacgagagagatgaatatgcttttaaagggaacaagtcaagccagccgtttatcttaccataaagatgacttaattgaaattcagtctatcttagctgagttaagaaaacaatttagaaacttaaagtggtacgctgaattgaataagagagcttttggtaagattttaaagaaattggataaaaaagtcggcacaaatcagcaaatgtctactatgaaaactagaatcttgccgttacaatttgctaatgattctcttattaccaaagatttgagtttgttgaaaactatctgggaacaagtgacgttcaggataaattcttacgagagagtaatgaggagtacctctccgaacgcaaatgctaatgataatacagaattctttaagattatttgcgtttttatagaagaagatgatagcaaaggattgattagagagttgacaaacttatattctgaattgtctttgattccaacaagaattatgataagtgttttaaacaaggcagcattatctaaatctttggcatgtattgatgctatcttaaaggttattccgtctttgaatgactctgaagatattaacagaagaaattttttccatcatcacataattgcaatcgggaagttaatcagaaaacaggaaattttaagtaggaaaaagaagtctcaaccctctaaatatactaatagtgagggagaaattgtaacagatttaagaaccttacatacgaccctttctgccccggcagaaagtgatagcattacagaggaggaaaaaagttctgcctgtacactctcttatattttagaggagttaccaattcatttaagaccatgcctttttcagcatgataattacaagagaacgcccttgcattattcttgccagtatggcttatctgaagttacgaagttgattatcaagttaatgaaagaatggaatatctggaatgaaatccctattgatgacgtttccgcgttcggagatgccgaatctttgacacctttacatttatgtgtgttgggtgctcatcccaaaacaacagaagtcttattgcaatctttggatccgaacgtgaaattaaaaagtagtagtttgttacatttggccactgagtggaataactatccccttttacatgttctcttgagttctaaaaggtttgatattaattatcaagacaacgaattacatgaaacaccgttatatcttgcttgtagattaaattttttcgaagctgctgtgtgtttgttgtacaatggagccgaccttgaaataagagaaaaactttttggctggacagctatcttcgttgcagcagcagaagggtttacggacattgtaaagctcttgatagccaacaacgcgaactttgatattgaagatgaaggtgggtggacgccgatggagcacgcggtattgcgcggtcatttgcacattgctgatatggttcaaatcagagacgaattggtcacgcatccccattctcagttgaacagtggtagcgaagagaaagaaccattgaacgaaattagtgccggagaattaaatgagagaaatgaaaatggaaacggaggtaataaagggtccttgggaaaattggccggaccaataaagagttatggacacagattcttggataataatgaatctcttatattaataacattgggaagtaatgacacaagaaacaaaagcccttctatttctttaagctctgaagcattggcaaaagttattgggttggaaacagattgtgcattatctttagtaatttcttgcaatgattctattgataaatcttctgtaatcttagatttaccattagatgataatgtggacgcagtagacttcaaagtgcctttcaaagttgattattctcatacattatattttgatattgtgccaacatatggaacacgctctttggagacccataatagaatagattgtcaaaaaaataacaataattacgtaatggcaaggggtgtttccatgttgaataagtcctacagctctgtgggagttaatagaagtatattaaatggtagcgtgacggtccccatcatcgctaatcatacattagagatacttgggacgttgaaatttgaatatattattatcacaccatttgaacatccacaattgcccttagaaagaacagaaacgtactggaaatccttagtgtccactcgtgttataggacatagaggcttgggtaaaaataatcctaataaatctttacaaattggagagaacacagtcgagtctttcatcatggcagcctctttgggagcaagttatgtagagtttgatgttcagttgacgaaggataacgtaccagtggtatatcacgattttctcgtagctgaaacaggtgtcgatatccccatgcatgaattgacgttagaacagtttttagatttgaacaatgccgataaagagcacattcaacgtggagcaggtcactctcctcatcatgtaaatggagcagatacagcattacaaaaatatagagggcgttctgtagatgattctgacgttagtacattgaggagagcttgggatttacacgacaacgacccgaatgggaagtccaacaatgctcattggtctgacaatagaatgaggttgaccaaaacatttaaaaagaacaattttaagggaaacgctagaggacattccatagcttcttcttttgttaccttgaaagaattattcaagaaaatccctgccaacgttgggtttaacatagaatgtaagtttcccatgcttgatgaggcagaagaggaagagttagggcaaataatgatggaaatgaaccattgggttgacaccgtgttaaaagtagtttttgacaatgcgaatggtagggacatcattttttcttcttttcatccggatatttgcatcatgctttctttaaagcaaccggttattccgatcttgttcttgacggaaggtggaagtgaacagatggccgatttgagagcctcttctttacaaaacggtataagatttgctaagaagtggaatttattggggattgtatctgctgcagcacccattttaaaggccccaagattggtgcaagtggttaagtctaatgggttggtatgtgtcacttacggtgtggacaacaatgatcccgaaaatgccagtatacaaattgaagcaggtgtagatgccgtgatcgtcgatagtgtattggcaattagacgtgggttaaccaaaaagaatgaaaagtga

SEQ ID NO: 11219 - DNA, 1974 bp, Saccharomyces cerevisiae
atgtcatttttaaagttcgcttatagaaactcttggcgatactatagcaagtccacacggcattttcataaaatacctataagacagttcataatacctacgtcaattgctttttatttgacacaaaattcgtttccaaaacaaaattgtttgatatacaatgattctctaaaaccggatcccaaaggtgatacttttgaaatgggcctctacgtttcctcagaaaacgaattgcaggaaaagcttaaatctttcaggtctgctaagatcactgaatcacgaaataaattaataagatatctaagaatcttttggttcggttttaatgataatattgttgagcctgtatgcacgattttaaggtttttagaaatttcagctatttttttacctcttctcctattataccccatatcatggtttggtcataaactcaaaattacggacaccaatataactgaaactcgaggttcattgatttggtgtcaactactgcgtaaagcattggaattggctggcccgagtttcattaaactcggacaatgggcaggatcgagaaccgatatattctctcacgcactgtgtcatgagttgggtaaattgcatagtaacgttacagctcactctctaagctttactctggaaaaactttctcaagcattaaaggttgacaagatcgaagatgcttttgatgaatttaatcgaacaccaattggagttgggtccatcgcacaagtttacgtgggtgaactatcccaaaagtacatcgataaatatgacaatatacaaattggtaaggatggaaatcgttggtgtgccatcaagatcttgcatccaaatgtaagatctcagatccggagagatttgaaaataatgaaattctgtgctgacgcaataaattggattccgactatggaatggctgtctttacccagcgaagtcgatcagttttccatattaatgaatattcagttggatctaagaattgaggcgttaaacctggaaagattcaatgagaactttaaaaattctattcaggtgaaatttcctaaaccatttctccccttgtcaaatagggatgttatgttcgaagagcatgtatatggtctttccatggaaaagtttttatctacgaagaagcaaattaacgacgttgaactttgtaaaaaagtcagtgatcccttcgttgacgcgtttctacaaatgctaattcttgatgattttgttcatgctgatttgcatccaggcaatgttataatcagatttgtgaagacgaacaaatacggcacaaacattatatcctccgaacttgaatcgtacagaataacgcacgacctgaggaagaagatagaggaggaccaagatcaggactttgttggaaaactgaagtctgtattaactaattacactccccaaatttgttttatcgatacaggaataattacagaattgaatgaaaaaaacagaattaatttcatagctctattcaacgcattggcccgatttgatggttatagagctggtgagttgatgattgagagatcaagaactccagaaacagctattgataaggaagtatttgcgtttaaggtagaaaagctagtggataaagttaaacaaagaacatttacattgggaaccgtctcaattggcgatttactcgatcaaatgcttagtatggtaaggtcgcaccatgttagaatggagtccgactttgtttccgtggtggtcgctattttacttctagagggtattggacgccagttagatccaaacttggacttatttgaaagttcgctgcctatattacgtgaattcgggtttaagcgggaagccaaaagtctcttgaaagatgcaagcacattatcaatgctcaagatatgggttggtttagaagtgcgtcaattaatgcatctctcgatgaagcaaatatacgatcttgtcaggactgatcaattgtgtcctaattattaa

SEQ ID NO: 11220 - DNA, 1974 bp, Artificial Sequence
  Description of Artificial Sequence: Synthetic polynucleotide
atgagttttttaaagttcgcttatagaaactcttggagatactatagcaagtccacaagacattttcataaaatacctataagacagttcataatacctacgtccattgctttttatttgacacaaaattcttttccaaaacaaaattgtttgatatacaatgattctttgaaaccggatcccaaaggtgatacttttgaaatgggcctctacgtttccagtgaaaacgaattgcaggaaaagcttaaatctttcaggtctgctaagatcactgaatctagaaataaattaataagatatttaagaatcttttggttcggttttaatgataatattgttgagcctgtatgcacgattttaaggtttttagaaatttctgctatttttttacctcttctcttgttataccccatatcttggtttggtcataaactcaaaattacggacaccaatataactgaaactagaggttctttgatttggtgtcaattattacgtaaagcattggaattggctggcccgagtttcattaaactcggacaatgggcaggaagcagaaccgatatattctctcacgcattatgtcatgagttgggtaaattgcatagtaacgttacagctcactctttaagctttactttggaaaaactttctcaagcattaaaggttgacaagatcgaagatgcttttgatgaatttaatagaacaccaattggagttgggtccatcgcacaagtttacgtgggtgaattatcccaaaagtacatcgataaatatgacaatatacaaattggtaaggatggaaatcgttggtgtgccatcaagatcttgcatccaaatgtaagatctcagatcagaagagatttgaaaataatgaaattctgtgctgacgcaataaattggattccgactatggaatggttatctttacccagcgaagtcgatcagttttccatattaatgaatattcagttggatttgagaattgaggcgttaaacttggaaagattcaatgagaactttaaaaattctattcaggtgaaatttcctaaaccatttctccccttgagcaatagggatgttatgttcgaagagcatgtatatggtctttccatggaaaagtttttatctacgaagaagcaaattaacgacgttgaactttgtaaaaaagtcagtgatcccttcgttgacgcgtttttgcaaatgttgattcttgatgattttgttcatgctgatttgcatccaggcaatgttataatcagatttgtgaagacgaacaaatacggcacaaacattatatcctccgaacttgaatcttacagaataacgcacgacttgaggaagaagatagaggaggaccaagatcaggactttgttggaaaattgaagtctgtattaactaattacactccccaaatttgttttatcgatacaggaataattacagaattgaatgaaaaaaacagaattaatttcatagctttattcaacgcattggccagatttgatggttatagagctggtgagttgatgattgagagatctagaactccagaaacagctattgataaggaagtatttgcgtttaaggtagaaaagttagtggataaagttaaacaaagaacatttacattgggaaccgtctctattggcgatttactcgatcaaatgcttagtatggtaaggtctcaccatgttagaatggagtccgactttgtttccgtggtggtcgctattttacttttggagggtattggacgccagttagatccaaacttggacttatttgaaagttctttgcctatattacgtgaattcgggtttaagagagaagccaaaagtctcttgaaagatgcaagcacattatctatgctcaagatatgggttggtttagaagtgcgtcaattaatgcatctctctatgaagcaaatatacgatcttgtcaggactgatcaattgtgtcctaattattga

SEQ ID NO: 11221 - DNA, 507 bp, Saccharomyces cerevisiae
atgaaagaagcatctgatagagaagaagcaccaaaaatggtggaaaaaaactatagtacaggttttaggaaagcccacggagagaaggatcaatcagtgactaagccaatctcgttagatggtagaacaggtgaagtaattgttagaaaatccaccgggaaaactaaaatacgtaaaggtcaaacggaagaagagtatacacagcaattgcagcactacttcgaagtagaacaaggccctgtgcggacaaaggtaggatggatggatgaggtagatcccttggttgagatccgggaaggcaagtacgatatctccaataagcatcagcgacaggtgcttagtggtttctgccatcgtttattttaccaatgtaagtacaaggagtgtctggatctcagcacctattttctggggctctttgaaccgttcaacgtgaagaataaaatgaagagggagcttgaagagttggaatatatgatcgagcgatgtcgtgggcatgtattataa

SEQ ID NO: 11222 - DNA, 507 bp, Artificial Sequence
  Description of Artificial Sequence: Synthetic polynucleotide
atgaaagaagcatctgatagagaagaagcaccaaaaatggtggaaaaaaactatagtacaggttttaggaaagcccacggagagaaggatcaatctgtgactaagccaatctctttagatggtagaacaggtgaagtaattgttagaaaatccaccgggaaaactaaaatacgtaaaggtcaaacggaagaagagtatacacagcaattgcagcactacttcgaagtagaacaaggccctgtgagaacaaaggtaggatggatggatgaggtagatcccttggttgagatcagagaaggcaagtacgatatctccaataagcatcagagacaggtgcttagtggtttctgccatcgtttattttaccaatgtaagtacaaggagtgtttggatctcagcacctattttttggggctctttgaaccgttcaacgtgaagaataaaatgaagagggagcttgaagagttggaatatatgatcgagagatgtcgtgggcatgtattatga

SEQ ID NO: 11223 - DNA, 747 bp, Saccharomyces cerevisiae
atgataagaaatcagggatggtcattactttacagaatttatccggtgcggaggttcacaagatactccagagtagatatgacttttgaaggaaacactcaagatatctctacttctgtcgaagaaagaatgaccactgtttttggaggacgcttaaagggtgaaccaccaagatccacaagtagagtgcttagcggcggaacgaagaaaatagcaggtgtccaagtgcctgcaaaaccacaagaacccgataactgttgcatgtcaggttgcgttaactgtgtctgggagatatatagcgaggatttaagagactggaaacatagaaggaaagaggctgcggaaaagatcgcaggaactaaggagaagtggcctaaagactggaatccacctttgggattgttacatatggaaaatgtccctgttgagttacgtgaaaagaagctggaaaccgatagcaaaaaagcagaacaacctcatgatttatctgctatcagaagtttgttccctaaaagaaaagggcctctgcccaagagtgtattggcagccaagaggaaaaatattgctttgagacacaattacgaacagaaagatggaggagaccaatcagtcagtgaatcagatgctgatgaaggctgggaagatattcctgtctacgttaaagcctttgcagagtttgaatcaaagaaaagattacaaaaaattcgccgacaggaagaaataaaaaagaggacagctttggtttga

SEQ ID NO: 11224 - DNA, 747 bp, Artificial Sequence
  Description of Artificial Sequence: Synthetic polynucleotide
atgataagaaatcagggatggtctttactttacagaatttatccggtgagaaggttcacaagatactccagagtagatatgacttttgaaggaaacactcaagatatctctacttctgtcgaagaaagaatgaccactgtttttggaggacgcttaaagggtgaaccaccaagatccacaagtagagtgcttagcggcggaacgaagaaaatagcaggtgtccaagtgcctgcaaaaccacaagaacccgataactgttgcatgagtggttgcgttaactgtgtctgggagatatatagcgaggatttaagagactggaaacatagaaggaaagaggctgcggaaaagatcgcaggaactaaggagaagtggcctaaagactggaatccacctttgggattgttacatatggaaaatgtccctgttgagttacgtgaaaagaagttggaaaccgatagcaaaaaagcagaacaacctcatgatttatctgctatcagaagtttgttccctaaaagaaaagggcctttgcccaagagtgtattggcagccaagaggaaaaatattgctttgagacacaattacgaacagaaagatggaggagaccaatctgtcagtgaaagtgatgctgatgaaggctgggaagatattcctgtctacgttaaagcctttgcagagtttgaatccaagaaaagattacaaaaaattcgccgtcaggaagaaataaaaaagaggacagctttggtttga

SEQ ID NO: 11225 - DNA, 2082 bp, Saccharomyces cerevisiae
atgagtactccatttggtttagatttaggtaacaataactctgtccttgccgttgctagaaacagaggtatcgacattgtcgttaatgaagtctctaaccgttccaccccatctgttgttggttttggtccaaagaacagatacttgggtgaaactggtaagaacaagcagacttccaacatcaagaacactgtcgccaacttgaaaagaattattggtttggattaccaccatccagatttcgagcaagaatctaagcacttcacctctaagttggttgaattggatgacaagaagactggtgccgaagttagattcgctggtgagaaacatgttttttcagctactcaactagctgccatgttcatcgacaaagtcaaggacaccgtcaagcaggacacaaaggcaaatattaccgatgtttgtattgctgtcccaccttggtacaccgaagaacaacgttacaacattgctgatgctgctagaattgctggtttgaaccctgttagaattgtcaacgacgttactgctgccggtgtttcttacggtatcttcaagactgatttgcctgaaggcgaagaaaagccaagaattgttgcctttgttgatattggtcactcttcctacacctgttctatcatggccttcaagaagggtcaattgaaagtcttaggaactgcctgcgacaagcattttggtggtagggacttcgatttggctataacagaacatttcgccgatgagttcaaaactaaatacaagattgacatcagagaaaatccaaaggcttacaacagaattctaactgctgctgaaaagttgaagaaagttttgtctgctaatactaatgccccattctctgttgaatccgtcatgaacgacgttgatgtttcctctcaattatctcgtgaagaattagaagaattggtcaagccattgttggaacgtgttactgaaccagttaccaaagctttagctcaagccaaattatctgctgaagaagttgattttgttgaaattattggtggtactactcgtatcccaacattgaaacaatccatttctgaagccttcggcaagccattgtccaccactttgaaccaagatgaagccatcgccaagggtgccgcctttatttgcgccattcactctccaactctaagagttagaccattcaagtttgaggatatccatccttactctgtctcttactcttgggacaagcaagttgaggacgaagaccacatggaagttttcccagctggttcatccttcccatctactaaattgatcactttgaaccgtacgggtgacttttcaatggctgctagctacactgacatcacacagttaccaccaaacactccagaacaaatcgctaactgggagatcactggtgttcaattaccagaaggtcaagactctgttcctgttaagttaaagttgagatgcgacccctctggtttacacacaattgaagaggcttacactattgaagatattgaagttgaagaacctattccattaccagaagatgctccagaagatgctgagcaagaatttaagaaggttactaaaactgtaaagaaggatgacttaaccatcgttgcacacacctttggcctagacgctaaaaagttgaatgaattaattgaaaaagaaaatgaaatgcttgctcaagataagctagttgctgagacagaagaccgtaagaacactcttgaagagtacatctacacattgcgtggtaagttggaagaagagtatgctccatttgcttccgatgctgaaaagacgaagttacaaggtatgttaaacaaggccgaagagtggttatacgatgaaggtttcgattccatcaaagctaagtacattgccaaatacgaagaattggcttctctaggtaacattattagaggtagatacttggctaaagaagaagaaaagaagcaagctataagatctaagcaagaagcatcccaaatggctgctatggctgaaaagttggctgctcaaagaaaggcagaagctgaaaagaaggaagaaaagaaggacactgaaggtgatgttgacatggactaa

SEQ ID NO: 11226 - DNA, 2082 bp, Artificial Sequence
  Description of Artificial Sequence: Synthetic polynucleotide
atgagtactccatttggtttagatttaggtaacaataactctgtccttgccgttgctagaaacagaggtatcgacattgtcgttaatgaagtctctaaccgttccaccccatctgttgttggttttggtccaaagaacagatacttgggtgaaactggtaagaacaagcagacttccaacatcaagaacactgtcgccaacttgaaaagaattattggtttggattaccaccatccagatttcgagcaagaatctaagcacttcacctctaagttggttgaattggatgacaagaagactggtgccgaagttagattcgctggtgagaaacatgttttttctgctactcaattggctgccatgttcatcgacaaagtcaaggacaccgtcaagcaggacacaaaggcaaatattaccgatgtttgtattgctgtcccaccttggtacaccgaagaacaacgttacaacattgctgatgctgctagaattgctggtttgaaccctgttagaattgtcaacgacgttactgctgccggtgtttcttacggtatcttcaagactgatttgcctgaaggcgaagaaaagccaagaattgttgcctttgttgatattggtcactcttcctacacctgttctatcatggccttcaagaagggtcaattgaaagtcttaggaactgcctgcgacaagcattttggtggtagggacttcgatttggctataacagaacatttcgccgatgagttcaaaactaaatacaagattgacatcagagaaaatccaaaggcttacaacagaattttgactgctgctgaaaagttgaagaaagttttgtctgctaatactaatgccccattctctgttgaatccgtcatgaacgacgttgatgtttcctctcaattatctcgtgaagaattagaagaattggtcaagccattgttggaacgtgttactgaaccagttaccaaagctttagctcaagccaaattatctgctgaagaagttgattttgttgaaattattggtggtactactcgtatcccaacattgaaacaatccatttctgaagccttcggcaagccattgtccaccactttgaaccaagatgaagccatcgccaagggtgccgcctttatttgcgccattcactctccaactttgagagttagaccattcaagtttgaggatatccatccttactctgtctcttactcttgggacaagcaagttgaggacgaagaccacatggaagttttcccagctggttcttccttcccatctactaaattgatcactttgaaccgtacgggtgacttttccatggctgctagctacactgacatcacacagttaccaccaaacactccagaacaaatcgctaactgggagatcactggtgttcaattaccagaaggtcaagactctgttcctgttaagttaaagttgagatgcgacccctctggtttacacacaattgaagaggcttacactattgaagatattgaagttgaagaacctattccattaccagaagatgctccagaagatgctgagcaagaatttaagaaggttactaaaactgtaaagaaggatgacttaaccatcgttgcacacacctttggccttgacgctaaaaagttgaatgaattaattgaaaaagaaaatgaaatgcttgctcaagataagttggttgctgagacagaagaccgtaagaacactcttgaagagtacatctacacattgcgtggtaagttggaagaagagtatgctccatttgcttccgatgctgaaaagacgaagttacaaggtatgttaaacaaggccgaagagtggttatacgatgaaggtttcgattccatcaaagctaagtacattgccaaatacgaagaattggcttctttgggtaacattattagaggtagatacttggctaaagaagaagaaaagaagcaagctataagatctaagcaagaagcatcccaaatggctgctatggctgaaaagttggctgctcaaagaaaggcagaagctgaaaagaaggaagaaaagaaggacactgaaggtgatgttgacatggactga

SEQ ID NO: 11227 - DNA, 2550 bp, Saccharomyces cerevisiae
atgaatcctatcaactctctagcgtttgaccttcacagtgttaaacttgcagacgcgaactcagacactgctgcattatcaaatagcaatactccaaccatgaacaatgcggctcttttgcaaaggccctcctccattatggattctattggcgtccaaagagttccatctccttttgtgccagggagtaatgcgattagtggagccagtactgttcccttcaatgcatatgacgctgaaattactggatctccgctacaaatatctgctaatcaggaaaacaatagtgcatttagtgcagcatcatccaacctgcatatgaacgccagcagcccttccgttctcaataaaccctcgagcacatttccaaatgtagctccttatctctacaacgcaacagggcctgcccccaacgttggtaatcaacccccaccaccggggatagaatctcagtggaaatacattgactctaatggtaacattcaggggccttttggtaccaataatatgtcacagtggtatcaaggaggttattttactccaactttgcaaatctgtagattagcaacatctcctgagccatttggtgtaaatgatcggtttattagactaggtgaattgactactctggtgaataattatcaagacccttttgtcgcctttgatttcattgttattagagctttgaatgctgttccacttgttgcaccaacttcatcagaaaagcaaaaagttgagtcaagagatttgatacctgttgctgatgtgcatagtgatgattttacgtatgaagaaatccttggccttaaatttgaagatggaagttactatcatgaaactcaggtttgggttccggttgacggccgtcatatcacaaaggtagatcgcataccaaagatatctgcatataccgctcctctatccacgacttctagtagatctaataaaaccacttcttcccatgaagagaaggttccttcccacgaggaagcttctccagaggagcaagaggttttttcagaagagggcagaactgtttctaacataacaaatgaagaggaatctattgtcaaaaatcctactaagcaggaggaagaatctcgaggaagcgagaaagagcaaaatatattggatcaagttcaaccagagattgaagaggtagaccgtaaggatgtaatatccactgctgatgagccgaaaagcaaagatacgccgcaaatgacttctgaagagcagaaaaggtttgcaaaggcagaactgatggcacaaaaattattggaagaacaacaaagacaagaagaagaaaaaaagagaagagaagaacagcgcaaattaaagaaggagaaaaaattgaagcaaaagcagaaaaaggaagaagagaagttaaaaaagaagaagaaggaagaaggaaaattagagaaagaaaagcaaaaagaattgctaaataacattttaactggagatacagaaactccatcttccgaaaacaccgcaacttccataaccactaatttggcgccttgggctaacaagaaacccgagggtgctgtttataatcagatttcatctgctcttgaagatttgaagaaggagaactcgtccaagaaagaaaaaaaacctaatcgtactcagttagatcgtgagcaggcattaaaactacagaaagaaatattaagctcggcgcaaattccgaaaactcaaactggttctgcctggggtataaagccacagcaaccgatcaaagttgatattaaaggagaattgatgaaagacagtaccaaaattaacagtcagtctaaaattaacaaggccaacaatggtgatattaaaccagattccacttttattgaagagcagaaaaagctgtgggaacaagttcaaaagaaaacaaagaaattcaaccgcgcttcttcactcgatgatttcatttcaagaacgccttccccatcttcttcggcattgaactcttcgaatactagcaatgcgtggaccacggtttcttctaagagcacaacccacatcgcttccaccatgcctgtcgctggtaaccagtcaaagtcatatatcagtttggacacactgcgttcttctggggggttatctaccgcaacaaaaactaaaatgagcgataagagtaaacaaattggctcatccactagtatcccgactttaaaggcccgtcaagttaaaccgtctcgcatccctgcctatcccggtaacgcttctgtctctaagcgtcaagaatttttgagatggtgccgatcccaattaaaactaaatacgggtgttcagcccgataatgttttagaaatgctacttagcttgcccccaggttcagaatccaaggaaattatcgcagataccatatattcctacagttcaacaatggacggtaggagatttgccactgatttcatcaaaaaacgtctagaatgcgaagaagaaattaatgaccccttgagctggagtgaagtattagctatgcctgaaggcagttccgaagactgggaatttcaagttgttggtaaaaagaaaggaaaaagattttga

SEQ ID NO: 11228 - DNA, 2550 bp, Artificial Sequence
  Description of Artificial Sequence: Synthetic polynucleotide
atgaatcctatcaactctttagcgtttgaccttcacagtgttaaacttgcagacgcgaacagcgacactgctgcattatccaatagcaatactccaaccatgaacaatgcggctcttttgcaaaggccctcctccattatggattctattggcgtccaaagagttccatctccttttgtgccagggagtaatgcgattagtggagccagtactgttcccttcaatgcatatgacgctgaaattactggatctccgttacaaatatctgctaatcaggaaaacaatagtgcatttagtgcagcatcttccaacttacatatgaacgccagcagcccttccgttctcaataaaccctctagcacatttccaaatgtagctccttatctctacaacgcaacagggcctgcccccaacgttggtaatcaacccccaccaccggggatagaatctcagtggaaatacattgactctaatggtaacattcaggggccttttggtaccaataatatgtctcagtggtatcaaggaggttattttactccaactttgcaaatctgtagattagcaacatctcctgagccatttggtgtaaatgatagatttattagattaggtgaattgactactttggtgaataattatcaagacccttttgtcgcctttgatttcattgttattagagctttgaatgctgttccacttgttgcaccaacttcttctgaaaagcaaaaagttgagagcagagatttgatacctgttgctgatgtgcatagtgatgattttacgtatgaagaaatccttggccttaaatttgaagatggaagttactatcatgaaactcaggtttgggttccggttgacggccgtcatatcacaaaggtagatcgcataccaaagatatctgcatataccgctcctttatccacgacttctagtagatctaataaaaccacttcttcccatgaagagaaggttccttcccacgaggaagcttctccagaggagcaagaggttttttctgaagagggcagaactgtttctaacataacaaatgaagaggaatctattgtcaaaaatcctactaagcaggaggaagaatctagaggaagcgagaaagagcaaaatatattggatcaagttcaaccagagattgaagaggtagaccgtaaggatgtaatatccactgctgatgagccgaaaagcaaagatacgccgcaaatgacttctgaagagcagaaaaggtttgcaaaggcagaattgatggcacaaaaattattggaagaacaacaaagacaagaagaagaaaaaaagagaagagaagaacagcgcaaattaaagaaggagaaaaaattgaagcaaaagcagaaaaaggaagaagagaagttaaaaaagaagaagaaggaagaaggaaaattagagaaagaaaagcaaaaagaattgttgaataacattttaactggagatacagaaactccatcttccgaaaacaccgcaacttccataaccactaatttggcgccttgggctaacaagaaacccgagggtgctgtttataatcagatttcttctgctcttgaagatttgaagaaggagaactcttccaagaaagaaaaaaaacctaatcgtactcagttagatcgtgagcaggcattaaaattacagaaagaaatattaagctctgcgcaaattccgaaaactcaaactggttctgcctggggtataaagccacagcaaccgatcaaagttgatattaaaggagaattgatgaaagacagtaccaaaattaacagtcagtctaaaattaacaaggccaacaatggtgatattaaaccagattccacttttattgaagagcagaaaaagttatgggaacaagttcaaaagaaaacaaagaaattcaaccgcgcttcttctctcgatgatttcatttctagaacgccttccccatcttcttctgcattgaactcttccaatactagcaatgcgtggaccacggtttcttctaagagcacaacccacatcgcttccaccatgcctgtcgctggtaaccagtccaagagttatatcagtttggacacattacgttcttctggggggttatctaccgcaacaaaaactaaaatgagcgataagagtaaacaaattggcagctccactagtatcccgactttaaaggcccgtcaagttaaaccgtctcgcatccctgcctatcccggtaacgcttctgtctctaagcgtcaagaatttttgagatggtgccgttcccaattaaaattgaatacgggtgttcagcccgataatgttttagaaatgttacttagcttgcccccaggttctgaatccaaggaaattatcgcagataccatatattcctacagttctacaatggacggtaggagatttgccactgatttcatcaaaaaacgtttagaatgcgaagaagaaattaatgaccccttgagctggagtgaagtattagctatgcctgaaggcagttccgaagactgggaatttcaagttgttggtaaaaagaaaggaaaaagattttga

SEQ ID NO: 11229 - DNA, 1977 bp, Saccharomyces cerevisiae
atgttggcccgttccagggtgtgcttgcagacaatcactagacggttggcagactttccagaagccaatgctattaagaaaaaatttctctttaggaaggacacctcgaccatcaaacagttaaaaggactgtctagcggccagaaaatagtactcaatggatggatagagcagaagccaaaaagagttgggaaaaatttgatcttcggacttttaagggactctaacggtgacattatccagttggttgataacaaatcgttgttgaaaggctttactttagaggatgtggttcaagccgtaggtatactctctttgaagaggaagctatcaaatgaggacgcagatgagtacgaagtgcaattggaggatattactgtgttaaatgcatctaataaaaaaccagcgcaaatgcaggattttaaattgtcagccatatacccacctgagttccgctatttgcaattgagaaatcccaaatatcaagattttttaaagaagaggtcatctatctctaaggaaataagaaactccttcaacaattttgattttacggaggtcgagaccccaatgttatttaaagctaccccagaaggcgcaagagagtttctggttccaacaaggacaaagagatccgatggtaaaccatcgttttatgctctagatcagagccctcaacaatacaagcaactcttaatggctagtggtgtcaacaaatattatcaaatggcaaggtgctttagagatgaagatttaagagcagacaggcagcctgagtttacacaggttgatatggaaatggcctttgctaattctgaagatgtcatgaaaatcatagaaaagacagtttctggggtatggagtaaattttccaaaaaacgaggattattgactttagacagtaagggtacattagtgcctgcgaaaaaggaaaacggcacagtatctatctttcgtatgacctacgaacaagccatgacctcatatggtattgacaagccagatttgagagcgccagatttgaagattatcaatttaggcgagttcaatgcctttagtcatttgaacaaaaaatttcccgtttttgaagtaattattctaagaagtgccttttcaaatatggaagagtacaaagaacgatggtcgtttctgacaaataacagtaattacaattatagagttccaatagtgctaccaattgaaaatgacgaacaagctaattcaaattggtttgagaattttcatgcaattgccacgtttgaaaacccacatctaataaccaaatttctgaaactgaaaaaaggtgacattgtatgcggttgtacgagagagccaaaccattccattttcgagaatcctactcccctgggaagattgagacagttggtgctacaaagtgagcatgggaaaaatatctatcatgctgtcaataaggatgttgcctcatggattgtggatttcccgttattttctcccgttataattgaagataagtctggtaaaaaagaaaagcttgcatatccggagtacgaaaaggatagactatgttccacgcatcatccttttactatggtgaagcttaaagactacgaaaaattagaaaagacgccggaaaagtgcttgggtcggcattatgacctcgtagttaacggtgtggaacttggtggtggctcaacaagaattcacgatccaagattacaagactatattttcgaagatatcctcaaaatagataatgcatatgaactatttggccatttactgaatgcttttgatatgggaacaccgccacacgctggatttgctattggttttgatcgtatgtgcgctatgatctgtgaaactgagagtataagggacgtaatcgccttcccaaaaagtattaccggggctgatttggttgtcaagagtccaagtgtgatacctgaaagcattctggaaccttacaatatcaagtatagtaattcaaaaaaatga

SEQ ID NO: 11230 - DNA, 1977 bp, Artificial Sequence
  Description of Artificial Sequence: Synthetic polynucleotide
atgttggcccgttccagggtgtgcttgcagacaatcactagaagattggcagactttccagaagccaatgctattaagaaaaaatttctctttaggaaggacacctccaccatcaaacagttaaaaggattatctagcggccagaaaatagtactcaatggatggatagagcagaagccaaaaagagttgggaaaaatttgatcttcggacttttaagggactctaacggtgacattatccagttggttgataacaaatctttgttgaaaggctttactttagaggatgtggttcaagccgtaggtatactctctttgaagaggaagttatccaatgaggacgcagatgagtacgaagtgcaattggaggatattactgtgttaaatgcatctaataaaaaaccagcgcaaatgcaggattttaaattgagtgccatatacccacctgagttccgctatttgcaattgagaaatcccaaatatcaagattttttaaagaagaggtcttctatctctaaggaaataagaaactccttcaacaattttgattttacggaggtcgagaccccaatgttatttaaagctaccccagaaggcgcaagagagtttttggttccaacaaggacaaagagatccgatggtaaaccatctttttatgctttagatcagagccctcaacaatacaagcaactcttaatggctagtggtgtcaacaaatattatcaaatggcaaggtgctttagagatgaagatttaagagcagacaggcagcctgagtttacacaggttgatatggaaatggcctttgctaattctgaagatgtcatgaaaatcatagaaaagacagtttctggggtatggagtaaattttccaaaaaaagaggattattgactttagacagtaagggtacattagtgcctgcgaaaaaggaaaacggcacagtatctatctttcgtatgacctacgaacaagccatgacctcttatggtattgacaagccagatttgagagcgccagatttgaagattatcaatttaggcgagttcaatgcctttagtcatttgaacaaaaaatttcccgtttttgaagtaattattttaagaagtgccttttctaatatggaagagtacaaagaaagatggtcttttttaacaaataacagtaattacaattatagagttccaatagtgttaccaattgaaaatgacgaacaagctaatagtaattggtttgagaattttcatgcaattgccacgtttgaaaacccacatttgataaccaaatttttgaaattgaaaaaaggtgacattgtatgcggttgtacgagagagccaaaccattccattttcgagaatcctactcccttaggaagattgagacagttggtgttgcaaagtgagcatgggaaaaatatctatcatgctgtcaataaggatgttgccagttggattgtggatttcccgttattttctcccgttataattgaagataagtctggtaaaaaagaaaagcttgcatatccggagtacgaaaaggatagattatgttccacgcatcatccttttactatggtgaagcttaaagactacgaaaaattagaaaagacgccggaaaagtgcttgggtagacattatgacctcgtagttaacggtgtggaacttggtggtggctctacaagaattcacgatccaagattacaagactatattttcgaagatatcctcaaaatagataatgcatatgaattatttggccatttattgaatgcttttgatatgggaacaccgccacacgctggatttgctattggttttgatcgtatgtgcgctatgatctgtgaaactgagagtataagggacgtaatcgccttcccaaaaagtattaccggggctgatttggttgtcaagagtccaagtgtgatacctgaaagcattttggaaccttacaatatcaagtatagtaattctaaaaaatga

SEQ ID NO: 11231 - DNA, 1407 bp, Saccharomyces cerevisiae
atgaattttgttacctgccatgttcagatgaggcttcttctccaaaggagactagtgcgtttacgagaatcagagctgtttagaccccagacatcattgtcaactttcaaaagacatgcttcgcaaaagacacgccctatacaaaaatgctcgagaaaatacgcacgtatacttctgttgtctgttttggtaccttacacaggatatgcgttttatgtatcattggctacagtgaagcaaattgatttaagaaacgaaatgtgtcaaagattagaggagaataataacgaggtcacttataagggatccttgctaaaatatagccctttggaagttttaggcagatttgagaacccgttcgaagaatacaggattcagaccgtttttgaattctttgcaaatagagtgttcgaattatttgaaagaaataggggaggtattccacgtgatgtacaccaaatgaataagttaatgcctgtacacaagccaacatgggggcctaacttagtggacgtcgaccccgcagaggaaacggcattgccgctagaatgcaaagtgttagacgaattgcacataccgactgcagtagaagaaaatgaaggatcaaagtgcccagtctataacacatggctgggccagtcctgtaactacacggtttataatggattgaggatacttactgatcctctgttcagtgactttcttatccacaagaccctgggtcctaaaagaattactcaaatgccatctcaaattacagaggtgcccaaaccagatatcatccttgtatcccataatcaccccgatcacctggatttagaaagcttggaatactggagtggcaaagactctcccttatggatagtacctaaaggaatgaaatcttatatgacaagtaacggctgtgataatgtcctagaattatcttggtgggaaactttgcaagtaaagaaaaacaatgagatataccacatatcggctactcctgccatgcattggtctgggagatcgctcttagatacgaacaagtctctatggtgctcctttttattaacacaccatggtaatcccatactttttcatgctggtgacactggatatgtgaaagatttattcgttagaattaaagaacgctttggcaaaggttgtaaattagcgctgcttccatgtggtcagtattgccctgagtggcaccaaaaaccacgacatattaatcctcaagaggttctcaagattatgaaagatctagaagctcgaaatgtattaggcgttcattgggggacctttgtattaagcggagaatatttcttagagccaaaggaaaaattagaaatgttggccgagtggggtgggtttaaagaccgctgctactgtccagaattgggcaagacagaatgcttcgactaa

SEQ ID NO: 11232 - DNA, 1407 bp, Artificial Sequence
  Description of Artificial Sequence: Synthetic polynucleotide
atgaattttgttacctgccatgttcagatgaggcttcttctccaaaggagattagtgcgtttaagagaaagtgagttatttagaccccagacatctttgtctactttcaaaagacatgcttctcaaaagacacgccctatacaaaaatgctctagaaaatacgcacgtatacttttattgtctgttttggtaccttacacaggatatgcgttttatgtatctttggctacagtgaagcaaattgatttaagaaacgaaatgtgtcaaagattagaggagaataataacgaggtcacttataagggatccttgttgaaatatagccctttggaagttttaggcagatttgagaacccgttcgaagaatacaggattcagaccgtttttgaattctttgcaaatagagtgttcgaattatttgaaagaaataggggaggtattccacgtgatgtacaccaaatgaataagttaatgcctgtacacaagccaacatgggggcctaacttagtggacgtcgaccccgcagaggaaacggcattgccgttggaatgcaaagtgttagacgaattgcacataccgactgcagtagaagaaaatgaaggatccaagtgcccagtctataacacatggttaggccagtcctgtaactacacggtttataatggattgaggatacttactgatcctcttttcagtgactttcttatccacaagaccttgggtcctaaaagaattactcaaatgccatctcaaattacagaggtgcccaaaccagatatcatccttgtatcccataatcaccccgatcacttggatttagaaagcttggaatactggagtggcaaagactctcccttatggatagtacctaaaggaatgaaatcttatatgacaagtaacggctgtgataatgtcttggaattatcttggtgggaaactttgcaagtaaagaaaaacaatgagatataccacatatctgctactcctgccatgcattggtctgggagaagtctcttagatacgaacaagtctctttggtgctcctttttattaacacaccatggtaatcccatactttttcatgctggtgacactggatatgtgaaagatttattcgttagaattaaagaacgctttggcaaaggttgtaaattagcgttacttccatgtggtcagtattgccctgagtggcaccaaaaaccaagacatattaatcctcaagaggttctcaagattatgaaagatttggaagctagaaatgtattaggcgttcattgggggacctttgtattaagcggagaatatttcttagagccaaaggaaaaattagaaatgttggccgagtggggtgggtttaaagaccgctgctactgtccagaattgggcaagacagaatgcttcgactga

SEQ ID NO: 11233 - DNA, 1371 bp, Saccharomyces cerevisiae
atgtcatttcgtaaaagaggtgaaatactgaacgatagaggtagcgggctaagaggtccactgttaagaggtcctccacgaacttcctcaacgccattgaggacaggcaacagaagagcccctggaaatgtgcccttgtctgacactacagcgagattaaagaagttgaatattgcggacgaatccaagacaaaaatggggctggatagctcccatgtgggcgttagaccttctcctgcaacctctcagccgacgacatcaactgggagtgctgacctggacagtatactaggccatatggggctgccgctgggaaactctgtactagtagaggagcagagcacgacagaatttcactctattctcggtaaactgtttgccgcacagggtatcgttcataatagaatttcagatagcagtgctgataaaactagaaacggcgacactcatgtcattgtcttgtcattgaaccaaatgtttgcaaaggagctacctggtatctacaagggatcacgtaaacaaatgaagaaaaacctaatctctgaagaagaatcaaaagttactgttcaaaatttgaacgagacccagagatcgacgccttccaggtacaaagacctgaaaattgcatggaaatataaactggcagatgaaaagagattgggttctccggatcgagatgacatccaacaaaattctgagtacaaggactacaatcatcagtttgatattacaacgcgtctgatgcccgctcccatagcatctgaactgacatttatcgccccaactcaacctgtctccactattttgagccaaatagaacagactattaaaaggaatgacaagaaactgataagaattgttattccttcccttctacatccggcaatgtatccgcccaaaatgtttgaatcatctgaaataataggtttaatgcacggtgtgaggagtcttgtcaagaaatactatgagcgggttgtactgtttgcttccatatccatagacattatcactcccccattactggtattgctgagaaacatgttcgattctgttatcaatctagaaccctttaaccaggagatgactgagttcttagaacgtgtttataaatcgcaaccggggaagattcaacatgggctagtccacatattgaaattaccagttttcacggaccgtggagagatgagagttttaaagtctgaatgggcatttaagaatggcagaaaaaagtttgaaatagaacaatggggcatacccgtggatgatgctgaaggttcagctgcctcggaacagtcacattcacactcgcactcggatgaaatctcacataatatacctgcaaagaagaccaagatatctttagactattaa

SEQ ID NO: 11234 - DNA, 1371 bp, Artificial Sequence
  Description of Artificial Sequence: Synthetic polynucleotide
atgagttttcgtaaaagaggtgaaatattaaacgatagaggtagcgggttgagaggtccattattaagaggtcctccaagaacttcctctacgccattgaggacaggcaacagaagagcccctggaaatgtgcccttgtctgacactacagcgagattaaagaagttgaatattgcggacgaatccaagacaaaaatggggttagatagctcccatgtgggcgttagaccttctcctgcaacctctcagccgacgacatctactgggagtgctgacttggacagtatattgggccatatggggttgccgttgggaaactctgtattggtagaggagcagagcacgacagaatttcactctattctcggtaaattatttgccgcacagggtatcgttcataatagaatttctgatagcagtgctgataaaactagaaacggcgacactcatgtcattgtcttgtctttgaaccaaatgtttgcaaaggagcttcctggtatctacaagggatcccgtaaacaaatgaagaaaaacttgatctctgaagaagaaagtaaagttactgttcaaaatttgaacgagacccagagatctacgccttccaggtacaaagacttgaaaattgcatggaaatataaattggcagatgaaaagagattgggttctccggatagagatgacatccaacaaaattctgagtacaaggactacaatcatcagtttgatattacaacgcgtttaatgcccgctcccatagcatctgaattaacatttatcgccccaactcaacctgtctccactattttgagccaaatagaacagactattaaaaggaatgacaagaaattgataagaattgttattccttcccttttacatccggcaatgtatccgcccaaaatgtttgaaagctctgaaataataggtttaatgcacggtgtgaggagtcttgtcaagaaatactatgagagagttgtattatttgcttccatatccatagacattatcactcccccattattggtattgttaagaaacatgttcgattctgttatcaatttggaaccctttaaccaggagatgactgagttcttagaacgtgtttataaatctcaaccggggaagattcaacatgggttagtccacatattgaaattaccagttttcacggaccgtggagagatgagagttttaaagtctgaatgggcatttaagaatggcagaaaaaagtttgaaatagaacaatggggcatacccgtggatgatgctgaaggttctgctgccagtgaacagtctcattctcactctcacagtgatgaaatctctcataatatacctgcaaagaagaccaagatatctttagactattga

SEQ ID NO: 11235 - DNA, 1491 bp, Saccharomyces cerevisiae
atgaaagtattacaattcaatcaagatgcaacgtgctgtgtggtggccgcgtcatcgcatcagatttcgatttttaactgcgacccctttggtaaatgttttgaaattgacactaagaattccaagaagaagacttcaaacaataacggttcagcttcaaactcagaatcacggaataatgaggagagcatattaataactaatggctcccgcgatcgtactgatgcagaagaagaggaagataatgaagataatgccctcgttacaggaaatatactgaaagaaggggagtttgtcattgaaatgttgttttcaactagtcttattgctattgcagatagaggacaaggtctaaacaaaggaaaaaagctgaagattgtcaatacaaagagaaaatgtactatttgtgaaatagttttcccacatgaaattgttgatgtggtcatgaatagaaaaagaatgtgcgtacttcttgaaagtgaccagatattcatttatgatatatcttgtatgaaacccttagaaactatcgatctttgggaagatcattataagaggtcccaagccaattcgttctcaaatgcgtcaaatactggtactttggagggagattctgcaaatttgaacagggtggctaccaatttactagcaaatgccactcaaaaaagtgtgaatggatctaatcctagtgtaagaaccagaagaaactctctaagaagtaaaataaggccaagaatggttttaagtaacgatgatagaagtatactgtgttttactgcgtatagctcgcccaagaagaataagcccaattcagaagcactatatgatgtagtgatttatgacacattaaatgtgacgccagttaattacttgaattccgttcataaggggaatgttgcatgtttagcagtaagtcacgatggtaaactgcttgctactgcctcagataaggggaccataataagggtgtttcatacgggggtagattcggactatatgtcttcaaggtcactgtttaaagaatttagacggggtaccagattgtgcaatttgtatcagctagctttcgataagagtatgactatgattggatgtgtaggtgatacggacactattcatcttttcaaacttgatgacgcctctaatagcctccctggagataattctagcaatggccactggaatgaagaggaatatatactagcatcaaattcaaatcccagtatgggaactccaaaggaaatacctctctcgaaaccaagaattgcgaattacttctcgaaaaaaataaaatcttcaataccaaaccagaacctgagccgtaactttgcttatataacagttaatgaatcgaacaggagttgcttagggtttccagacgaatttcccaaccaagtctatattgcctctgatgatggaaccttcagtatatatagtattccgtcaaaacctggtgaatgtgtgctgactaaaaataataaatttacataa

SEQ ID NO: 11236 - DNA, 1491 bp, Artificial Sequence
  Description of Artificial Sequence: Synthetic polynucleotide
atgaaagtattacaattcaatcaagatgcaacgtgctgtgtggtggccgcgtcttctcatcagatttccatttttaactgcgacccctttggtaaatgttttgaaattgacactaagaattccaagaagaagacttctaacaataacggttctgcttctaactctgaatctagaaataatgaggagagcatattaataactaatggctcccgcgatcgtactgatgcagaagaagaggaagataatgaagataatgccctcgttacaggaaatatattgaaagaaggggagtttgtcattgaaatgttgttttccactagtcttattgctattgcagatagaggacaaggtttgaacaaaggaaaaaagttgaagattgtcaatacaaagagaaaatgtactatttgtgaaatagttttcccacatgaaattgttgatgtggtcatgaatagaaaaagaatgtgcgtacttcttgaaagtgaccagatattcatttatgatatatcttgtatgaaacccttagaaactatcgatctttgggaagatcattataagaggtcccaagccaattctttcagtaatgcgtctaatactggtactttggagggagattctgcaaatttgaacagggtggctaccaatttattggcaaatgccactcaaaaaagtgtgaatggatctaatcctagtgtaagaaccagaagaaactctttgagaagtaaaataaggccaagaatggttttaagtaacgatgatagaagtatattatgttttactgcgtatagctctcccaagaagaataagcccaattctgaagcattatatgatgtagtgatttatgacacattaaatgtgacgccagttaattacttgaattccgttcataaggggaatgttgcatgtttagcagtaagtcacgatggtaaattacttgctactgcctctgataaggggaccataataagggtgtttcatacgggggtagattctgactatatgtcttccaggtccttatttaaagaatttagaagaggtaccagattgtgcaatttgtatcagttagctttcgataagagtatgactatgattggatgtgtaggtgatacggacactattcatcttttcaaacttgatgacgcctctaatagcctccctggagataattctagcaatggccactggaatgaagaggaatatatattggcatctaatagtaatcccagtatgggaactccaaaggaaatacctctctctaaaccaagaattgcgaattacttctccaaaaaaataaaatcttctataccaaaccagaacttgagccgtaactttgcttatataacagttaatgaatctaacaggagttgcttagggtttccagacgaatttcccaaccaagtctatattgcctctgatgatggaaccttcagtatatatagtattccgtccaaacctggtgaatgtgtgttgactaaaaataataaatttacatga

SEQ ID NO: 11237 - DNA, 549 bp, Saccharomyces cerevisiae
atgttaaaaagacgctctaatgctctcattactttgagtagaactaaattgtttcccataacaaccgttgcctattaccacaggcgcctcctcaaccaacaacgaagagctgtttcaacgtcaccgaagaaagaaatcaagagcctagaagacttggctaatttggattctttggatggtgttgatactgaactgatacgcgatttgattaatgagcatactacaaaattaaatatcaaaaaggagttagatatgctcaaaaaattctcgcaagaggaagaatcaggacatgagatccctgtaaaaagatttattaggcctctttggatgttcattctaatgggatcttccgtttatttactgcttcacttctcttggtggaaactagagcatgaggagagagaaagtcagctaaagaaagaggtagaaatcctggaacaccaattaaatgagttaattgtacaggataaaacccacaatactagtaggggaaagggcagtaatgaatcaacacatatgaagccttggtataggagatggttttggtga

SEQ ID NO: 11238 - DNA, 549 bp, Artificial Sequence
  Description of Artificial Sequence: Synthetic polynucleotide
atgttaaaaagacgctctaatgctctcattactttgagtagaactaaattgtttcccataacaaccgttgcctattaccacaggcgcctcctcaaccaacaaagaagagctgtttccacgtctccgaagaaagaaatcaagagcttggaagacttggctaatttggattctttggatggtgttgatactgaattgatacgcgatttgattaatgagcatactacaaaattaaatatcaaaaaggagttagatatgctcaaaaaattctctcaagaggaagaatctggacatgagatccctgtaaaaagatttattaggcctctttggatgttcattttgatgggatcttccgtttatttattacttcacttctcttggtggaaattagagcatgaggagagagaaagtcagttgaagaaagaggtagaaatcttggaacaccaattaaatgagttaattgtacaggataaaacccacaatactagtaggggaaagggcagtaatgaatctacacatatgaagccttggtataggagatggttttggtga

SEQ ID NO: 11239 - DNA, 342 bp, Saccharomyces cerevisiae
atgcctcctcttccacaaaattatgcgcaacagcagccttcgaattgggacaaattcaaaatggggttgatgatgggtactaccgtcggtgtctgcacaggcatcctatttggtggatttgccatcgcaactcaaggcccaggtcctgatggtgtagttagaacactagggaaatacattgctggttcagcgggtacctttgggctatttatgtccatcgggtctataatcagaagtgatagtgaaagtagtccaatgtcccatcctaacctgaacctacagcaacaggcaagactggaaatgtggaagcttcgtgccaaatacggtatacgtaaggactga

SEQ ID NO: 11240 - DNA, 342 bp, Artificial Sequence
  Description of Artificial Sequence: Synthetic polynucleotide
atgcctcctcttccacaaaattatgcgcaacagcagccttccaattgggacaaattcaaaatggggttgatgatgggtactaccgtcggtgtctgcacaggcatcttatttggtggatttgccatcgcaactcaaggcccaggtcctgatggtgtagttagaacattagggaaatacattgctggttctgcgggtacctttgggttgtttatgtccatcgggtctataatcagaagtgatagtgaaagtagtccaatgtcccatcctaacttgaacttacagcaacaggcaagattagaaatgtggaagcttcgtgccaaatacggtatacgtaaggactga

SEQ ID NO: 11241 - DNA, 1479 bp, Saccharomyces cerevisiae
atgctcgaattacgaagttgtagtaatttggtcaatagtagtaggagacttgtgcctctggtgacttattccggactaagtgcaataacattgcctaaatctcgattttattcacagcctagtgctttagaagtacagggcacatcggattctcgaagcgataatattttagacgaactcaaacaaaggggtctagtgtcccaggtctcacagccagagagtttccttcggacgaagttgaacggtaacgataagatcaaattatactgcggggtggatcccacagctcagtcacttcatttgggaaatctagttccactaatggttttattacacttttacgtaaaaggtcacgacattgtcactgtgataggtggagctacagggaaagttggggacccaagtggtaggaaaacagaaagagacgttatggagaacgatattaggcaaagcaatgtggcatccatctcgcagcaattacaaaggtttttcaaaaatggcctagaatattacagaaaccgatgtgctctcactgaagatgtaccttccggaaaatatacaccaaggaataatttcaactggtggaaagacatcaaaatgttggatttcttagctgattttggtaggcacattcgggtacaatctatgttggcgagggattcaatttcttcgaggcttcaaaccaaaaatggtctgggatttaacgaatttacttaccaagttttacaagcgtacgatttttaccatttgtataaggaagagaatgtgactatacaagtaggtggtaacgaccaatggggaaatataacagccggtatcgatctcatcaataggatacagcctataaagaataagggtttgccatttggtatcactgtgcccttgttgacgacggctacaggagagaaatttgggaaaagtgcaggcaatgctgtttttattgacccctcaatcaatacggcgtatgatgtttaccagttcttttataatactttggatgctgatgtacccaagttcttgaagatctttacgtttttaaactcaagtgaaatcaaaaaaattgtggaaacgcatatcaaatcacccagtctacgttatggccaaactttattggctaaagaagtcacagatatgttatatggagttggctccggatcggattcagaagcgctttctaatattatttttggacgttatgacggaactttatctgctgcgaagttagttgatctatgtaaaaaagccagaattttgcagtatgctgatagagagattgacttaataaagttaatttgtaaactagtaaattgttcagtatcagaagccagaagaaaactttcccagggaagcgtgtatctgcatcattcaaaatctaaagtaaacgaaaatatttctaacttggctcctttcctgatagatgatcgagtactgatcttgaggataggaaagcagaagtgttttataatagaaatgcgttaa

SEQ ID NO: 11242 - DNA, 1479 bp, Artificial Sequence
  Description of Artificial Sequence: Synthetic polynucleotide
atgctcgaattaagaagttgtagtaatttggtcaatagtagtaggagacttgtgcctttagtgacttattccggattgagtgcaataacattgcctaaatctagattttattctcagcctagtgctttagaagtacagggcacatctgattctagaagcgataatattttagacgaactcaaacaaaggggtttagtgtcccaggtctcccagccagagagtttccttagaacgaagttgaacggtaacgataagatcaaattatactgcggggtggatcccacagctcagtctcttcatttgggaaatttggttccattaatggttttattacacttttacgtaaaaggtcacgacattgtcactgtgataggtggagctacagggaaagttggggacccaagtggtaggaaaacagaaagagacgttatggagaacgatattaggcaaagcaatgtggcatccatctctcagcaattacaaaggtttttcaaaaatggccttgaatattacagaaacagatgtgctctcactgaagatgtaccttccggaaaatatacaccaaggaataatttcaactggtggaaagacatcaaaatgttggatttcttagctgattttggtaggcacattagagtacaatctatgttggcgagggattctatttcttccaggcttcaaaccaaaaatggtttgggatttaacgaatttacttaccaagttttacaagcgtacgatttttaccatttgtataaggaagagaatgtgactatacaagtaggtggtaacgaccaatggggaaatataacagccggtatcgatctcatcaataggatacagcctataaagaataagggtttgccatttggtatcactgtgcccttgttgacgacggctacaggagagaaatttgggaaaagtgcaggcaatgctgtttttattgacccctccatcaatacggcgtatgatgtttaccagttcttttataatactttggatgctgatgtacccaagttcttgaagatctttacgtttttaaacagtagtgaaatcaaaaaaattgtggaaacgcatatcaaaagtcccagtttacgttatggccaaactttattggctaaagaagtcacagatatgttatatggagttggctccggaagtgattctgaagcgctttctaatattatttttggacgttatgacggaactttatctgctgcgaagttagttgatttatgtaaaaaagccagaattttgcagtatgctgatagagagattgacttaataaagttaatttgtaaattagtaaattgttctgtatctgaagccagaagaaaactttcccagggaagcgtgtatttgcatcattctaaatctaaagtaaacgaaaatatttctaacttggctcctttcttgatagatgatagagtattgatcttgaggataggaaagcagaagtgttttataatagaaatgcgttga

SEQ ID NO: 11243 - DNA, 207 bp, Saccharomyces cerevisiae
atgagaccacgtgaccaaggctttttggttttagggtttacttactcggtactcctaattagtcttgctacattttactggttacgcaacaatgactctttcctgcactactggtgtgtattactgctatgccctgcgactctctggctgtgggccctcatagcctggtgtgacagtgaaatgttcgcaagtagtaaagatgaataa

SEQ ID NO: 11244 - DNA, 207 bp, Artificial Sequence
  Description of Artificial Sequence: Synthetic polynucleotide
atgagaccacgtgaccaaggctttttggttttagggtttacttacagtgtactcttgattagtcttgctacattttactggttacgcaacaatgactctttcttgcactactggtgtgtattattattatgccctgcgactctctggttatgggccctcatagcctggtgtgacagtgaaatgttcgcaagtagtaaagatgaatga

SEQ ID NO: 11245 - DNA, 1092 bp, Saccharomyces cerevisiae
atgggagaggtatacgaaaaaaataacatagattttgattcaatagccaaaatgttgttaattaagtataaggatttcatactgtctaaattcaagaaagctgcacctgtagagaatataaggtttcagaatttagtccatacaaatcaattcgcacaaggagtcctaggtcagagtcaacatctctgtacagtctatgacaatccttcatggcattctatagtcctggagacattggatctggatctaatatataaaaatgttgataaggaatttgccaaagatgggcatgcagagggggaaaatatatacacggattatctagtaaaggagctgcttcgctacttcaaacaagattttttcaaatggtgcaataaaccagattgtaatcattgtggccagaacacttcagaaaatatgacacctctgggcagtcaagggcccaatggagaggaatctaaattcaattgcggaactgttgagatctataaatgcaaccgatgcggaaatatcactagatttcctcgttataacgatccaattaagttgctggaaactagaaagggaagatgcggtgaatggtgcaatttatttactttgattttgaagtcgtttgggttagatgttcgctacgtctggaatagagaagatcatgtttggtgtgaatatttttcaaattttttgaataggtgggttcatgtcgactcctgtgagcaatcattcgaccaaccatatatctattcaattaactggaacaagaaaatgagttactgtattgcgttcggtaaagatggcgttgttgacgttagtaaacgctatatcctccaaaacgagctgcccagagatcaaatcaaggaagaagatttaaaattcctttgtcaatttataacgaagaggttgaggtattcgttaaatgatgacgagatataccaacttgcatgtcgcgatgagcaggaacagatagagctgattagaggaaagacacaagaaacgaaatccgaaagcgtcagtgccgcttcgaaatcatctaatcgtggtagagaaagtggatcggcggattggaaagcacagcgtggggaggatggtaaatag

SEQ ID NO: 11246 - DNA, 1092 bp, Artificial Sequence
  Description of Artificial Sequence: Synthetic polynucleotide
atgggagaggtatacgaaaaaaataacatagattttgattctatagccaaaatgttgttaattaagtataaggatttcatattatctaaattcaagaaagctgcacctgtagagaatataaggtttcagaatttagtccatacaaatcaattcgcacaaggagtcttgggtcagagtcaacatctctgtacagtctatgacaatccttcctggcattctatagtcttggagacattggatttggatttgatatataaaaatgttgataaggaatttgccaaagatgggcatgcagagggggaaaatatatacacggattatttggtaaaggagttgcttcgctacttcaaacaagattttttcaaatggtgcaataaaccagattgtaatcattgtggccagaacacttctgaaaatatgacacctttgggcagtcaagggcccaatggagaggaatctaaattcaattgcggaactgttgagatctataaatgcaacagatgcggaaatatcactagatttcctcgttataacgatccaattaagttgttggaaactagaaagggaagatgcggtgaatggtgcaatttatttactttgattttgaagagctttgggttagatgttcgctacgtctggaatagagaagatcatgtttggtgtgaatatttttctaattttttgaataggtgggttcatgtcgactcctgtgagcaaagtttcgaccaaccatatatctattctattaactggaacaagaaaatgagttactgtattgcgttcggtaaagatggcgttgttgacgttagtaaacgctatatcctccaaaacgagttgcccagagatcaaatcaaggaagaagatttaaaattcctttgtcaatttataacgaagaggttgaggtattctttaaatgatgacgagatataccaacttgcatgtcgcgatgagcaggaacagatagagttgattagaggaaagacacaagaaacgaaatccgaaagcgtcagtgccgcttccaaatcttctaatcgtggtagagaaagtggaagtgcggattggaaagcacagcgtggggaggatggtaaatga

SEQ ID NO: 11247 - DNA, 1371 bp, Saccharomyces cerevisiae
atgtttcgctcgggttactatccaactgtcactcctagccattggggctataacggcaccgtcaaacatgtactgggagagaaaggaaccaagtctttggctttcagagattctaagcgccaaattcctcttcatgaattcgtaaccaaacacgtgcctacactcaaagatggtgcaaattttaggttaaacagcttgcttttcacaggttacttacagaccctttatttgtcagccggtgatttttccaaaaaatttcaggtattttatggaagagagattataaaattttctgatggaggggtctgcactgcagattgggttatgcctgaatgggagcaaacatattcattaaatgctgaaaaggctagttttaacgagaaacaattttcgaacgatgaaaaggccacccatccaaagggttggcctcgtcttcacccgagaactagatatctatcctctgaggaacttgaaaaatgtcattctaagggttattcttaccctttagtggtagtacttcatggtcttgcagggggaagccatgagcctctcatcagggcattatctgaagatctatcaaaagtcggtgacggtaaattccaagtggtagtccttaatgctagaggttgctcaagatctaaagtcaccacccgtagaatctttaccgcattacacacaggtgatgtgagagaatttttgaaccaccaaaaagctctatttccgcaaagaaaaatatatgcagtcggaacatcatttggagcagccatgctaacgaactacttaggtgaagaaggagataactgtccattaaatgctgcagtcgctctctcaaacccatgggatttcgtacacacttgggacaagttggctcatgattggtggtccaaccatattttttctagaactttaacacaatttctaacaaggactgtcaaggttaatatgaatgagttgcaggtaccagagaattttgaggtttcgcacaaaccgacagttgagaaaccagtcttttatacgtataccagagaaaatttggaaaaggctgaaaaatttacagacatattagaattcgataatcttttcactgccccatcgatgggcctgccggacgggttaacatattatagaaaggccagttcgataaatagattgcctaatatcaaaatcccaactttaataatcaacgcaacggatgatccagttacaggtgaaaacgtaattccgtacaaacaagctagagaaaatccttgtgtgttgttatgcgagactgacttgggtggacatttggcttatctcgacaatgaaagtaattcctggttaacaaagcaagctgccgagttcttgggcagctttgatgagttagttttataa

SEQ ID NO: 11248 - DNA, 1371 bp, Artificial Sequence
  Description of Artificial Sequence: Synthetic polynucleotide
atgtttcgctctggttactatccaactgtcactcctagccattggggctataacggcaccgtcaaacatgtattgggagagaaaggaaccaagtctttggctttcagagattctaagcgccaaattcctcttcatgaattcgtaaccaaacacgtgcctacactcaaagatggtgcaaattttaggttaaacagcttgcttttcacaggttacttacagaccctttatttgagtgccggtgatttttccaaaaaatttcaggtattttatggaagagagattataaaattttctgatggaggggtctgcactgcagattgggttatgcctgaatgggagcaaacatattctttaaatgctgaaaaggctagttttaacgagaaacaattttccaacgatgaaaaggccacccatccaaagggttggcctcgtcttcacccgagaactagatatttatcctctgaggaacttgaaaaatgtcattctaagggttattcttaccctttagtggtagtacttcatggtcttgcagggggaagccatgagcctctcatcagggcattatctgaagatttatccaaagtcggtgacggtaaattccaagtggtagtccttaatgctagaggttgctctagatctaaagtcaccacccgtagaatctttaccgcattacacacaggtgatgtgagagaatttttgaaccaccaaaaagctttgtttccgcaaagaaaaatatatgcagtcggaacatcttttggagcagccatgcttacgaactacttaggtgaagaaggagataactgtccattaaatgctgcagtcgctctctccaacccatgggatttcgtacacacttgggacaagttggctcatgattggtggtccaaccatattttttctagaactttaacacaatttttaacaaggactgtcaaggttaatatgaatgagttgcaggtaccagagaattttgaggtttctcacaaaccgacagttgagaaaccagtcttttatacgtataccagagaaaatttggaaaaggctgaaaaatttacagacatattagaattcgataatcttttcactgccccaagcatgggcttaccggacgggttaacatattatagaaaggccagtagtataaatagattgcctaatatcaaaatcccaactttaataatcaacgcaacggatgatccagttacaggtgaaaacgtaattccgtacaaacaagctagagaaaatccttgtgtgttgttatgcgagactgacttgggtggacatttggcttatctcgacaatgaaagtaattcctggttaacaaagcaagctgccgagttcttgggcagctttgatgagttagttttatga

SEQ ID NO: 11249 - DNA, 825 bp, Saccharomyces cerevisiae
atgtcagccgtaggtccaggtagcaatgcaggtgctagtgtcaatggcggatctgctacagccattgctactcttttacgcaaccataaggagttgaagcaaaggcagggtttattccaggccaagcagacagacttcttccgttacaagagatttgttagggcactgcattctgaggagtatgccaacaaatctgcaagacagccagagatatatccaactataccttctaacaagatcgaagaccagcttaagtcacgtgaaatctttattcaacttataaaggcacaaatggtgatcccagtgaaaaaattgcatagtcaagaatgcaaagagcatggattgaagccaagcaaggactttccgcacttgattgtttcgaataaagcacaattggaagccgatgaatactttgtttggaactataaccctagaacctacatggattacttgatcgtcattggtgtcgtgtccatcatattggcgctcgtatgctacccattgtggccgcgctccatgagacgcggctcctattatgtgtctctgggtgccttcggcatcttagcaggcttctttgctgtcgctatcctgagattgatattatatgttttgtcattaattgtctacaaagatgttggtgggttctggatctttcccaacctgttcgaagattgcggtgtactagagagttttaagccactttacggttttggtgagaaggatacttatagttacaaaaagaaactgaaaagaatgaagaagaaacaagccaagagagaaagcaataagaagaaagccatcaatgaaaaagccgaacaaaactga

SEQ ID NO: 11250 - DNA, 825 bp, Artificial Sequence
  Description of Artificial Sequence: Synthetic polynucleotide
atgtctgccgtaggtccaggtagcaatgcaggtgctagtgtcaatggcggatctgctacagccattgctactcttttacgcaaccataaggagttgaagcaaaggcagggtttattccaggccaagcagacagacttcttccgttacaagagatttgttagggcattgcattctgaggagtatgccaacaaatctgcaagacagccagagatatatccaactataccttctaacaagatcgaagaccagcttaagtctcgtgaaatctttattcaacttataaaggcacaaatggtgatcccagtgaaaaaattgcatagtcaagaatgcaaagagcatggattgaagccaagcaaggactttccgcacttgattgtttctaataaagcacaattggaagccgatgaatactttgtttggaactataaccctagaacctacatggattacttgatcgtcattggtgtcgtgtccatcatattggcgctcgtatgctacccattgtggccgcgctccatgagacgcggctcctattatgtgtctttgggtgccttcggcatcttagcaggcttctttgctgtcgctatcttaagattgatattatatgttttgtctttaattgtctacaaagatgttggtgggttctggatctttcccaacttgttcgaagattgcggtgtattggagagttttaagccactttacggttttggtgagaaggatacttatagttacaaaaagaaattgaaaagaatgaagaagaaacaagccaagagagaaagcaataagaagaaagccatcaatgaaaaagccgaacaaaactga

SEQ ID NO: 11251 - DNA, 1944 bp, Saccharomyces cerevisiae
atgcaactttcatggaaggatatccctactgtcgctccagcaaatgatttgctggatattgtcttgaacagaacccagagaaagacaccaactgtgatcagacctggtttcaagattacaagaatcagagcgttctatatgcgtaaagttaaatacacaggtgaaggtttcgtggaaaaatttgaggacattttaaagggttttcctaacatcaatgacgtgcatcctttccatagagatttgatggacaccctatacgaaaagaatcattacaagatatctttggcagctatatctcgtgcgaagtcccttgtggaacaagtcgccagagattatgtcagattgctaaaattcggtcaatctttatttcaatgtaaacaattgaaaagggccgctttaggtagaatggcaactatagtcaagaaattgagggacccattggcctatttggaacaagtcagacagcacattggtagattaccatcgatcgacccaaataccagaaccttgctgatctgtggttatccaaatgtcggtaagtcctcgtttttgagatgcattaccaaatcagacgtcgatgttcaaccatatgctttcacaaccaagagtttatacgttggtcattttgactacaaatacttgagatttcaagctattgacacccctggtatcctagatagacccactgaagaaatgaacaacattgaaatgcaatcgatttatgccattgcccatttacgttcttgtgttttgtacttcatggatctttccgaacaatgtggtttcaccatcgaagctcaagttaaactattccactccatcaagcctctattcgccaacaagtctgtcatggttgttatcaacaaaaccgacattatcagaccggaggatttagacgaagagcgtgcacaattactggaatctgttaaggaggttccaggtgttgaaatcatgacttcttcatgccaactggaagaaaacgttatggaagttagaaacaaagcatgtgaaaaactattggcttctagaattgagaataagttgaaatctcagtctagaatcaacaatgttctgaacaagattcatgttgctcaacctcaagcaagagatgatgtcaagagaacaccatttatcccagaatctgtcaagaatttgaagaaatacgaccctgaagatccaaacaggagaaagttggccagagacatcgaagctgaaaatggtggtgctggtgtcttcaatgttaacttgaaggacaagtacctattagaagatgatgagtggaagaatgacatcatgccagaaatcttggatggtaagaatgtttatgatttcttggaccctgaaatcgctgctaaactgcaggctcttgaagaagaagaagaaaaattggagaacgaagggttctacaattctgacgatgaggaagaaatctacgacggtttcgaagcatccgaagtagatgatatcaaggagaaagctgcatggattagaaatagacaaaagacgatgattgctgaagcaagaaataggaagtccttgaagaacaaagctatcatgccacgttctaaactaactaagtcctttggtaaaatggaagaacacatgtccactttgggccatgacatgtcagccttacaagataaacagaaccgtgctgctcgtaagaaccgttatgttgaaagaggttctgatgttgtttttggcgaccaagatgctttgacagcttccactgaaaacggtgtcaagttgagacaaaccgatagactgttggatggtgttgctgatggctccatgagatccaaggccgacaggatggccaagatggaaagaagagaaagaaatagacatgccaagcaaggtgaatctgatagacacaatgctgtttccttatcaaagcatttattcagtggtaagcgtggtgtcggtaagacagatttccgttga

SEQ ID NO: 11252 - DNA, 1944 bp, Artificial Sequence
  Description of Artificial Sequence: Synthetic polynucleotide
atgcaactttcttggaaggatatccctactgtcgctccagcaaatgatttgttggatattgtcttgaacagaacccagagaaagacaccaactgtgatcagacctggtttcaagattacaagaatcagagcgttctatatgcgtaaagttaaatacacaggtgaaggtttcgtggaaaaatttgaggacattttaaagggttttcctaacatcaatgacgtgcatcctttccatagagatttgatggacaccttatacgaaaagaatcattacaagatatctttggcagctatatctcgtgcgaagtcccttgtggaacaagtcgccagagattatgtcagattgttgaaattcggtcaatctttatttcaatgtaaacaattgaaaagggccgctttaggtagaatggcaactatagtcaagaaattgagggacccattggcctatttggaacaagtcagacagcacattggtagattaccatccatcgacccaaataccagaaccttgttgatctgtggttatccaaatgtcggtaagtcctcttttttgagatgcattaccaaaagtgacgtcgatgttcaaccatatgctttcacaaccaagagtttatacgttggtcattttgactacaaatacttgagatttcaagctattgacacccctggtatcttagatagacccactgaagaaatgaacaacattgaaatgcaatctatttatgccattgcccatttacgttcttgtgttttgtacttcatggatctttccgaacaatgtggtttcaccatcgaagctcaagttaaattattccactccatcaagcctcttttcgccaacaagtctgtcatggttgttatcaacaaaaccgacattatcagaccggaggatttagacgaagagcgtgcacaattattggaatctgttaaggaggttccaggtgttgaaatcatgacttctagttgccaattggaagaaaacgttatggaagttagaaacaaagcatgtgaaaaacttttggcttctagaattgagaataagttgaaatctcagtctagaatcaacaatgttttgaacaagattcatgttgctcaacctcaagcaagagatgatgtcaagagaacaccatttatcccagaatctgtcaagaatttgaagaaatacgaccctgaagatccaaacaggagaaagttggccagagacatcgaagctgaaaatggtggtgctggtgtcttcaatgttaacttgaaggacaagtacttattagaagatgatgagtggaagaatgacatcatgccagaaatcttggatggtaagaatgtttatgatttcttggaccctgaaatcgctgctaaattacaggctcttgaagaagaagaagaaaaattggagaacgaagggttctacaattctgacgatgaggaagaaatctacgacggtttcgaagcatccgaagtagatgatatcaaggagaaagctgcatggattagaaatagacaaaagacgatgattgctgaagcaagaaataggaagtccttgaagaacaaagctatcatgccacgttctaaattaactaagtcctttggtaaaatggaagaacacatgtccactttgggccatgacatgtctgccttacaagataaacagaaccgtgctgctcgtaagaaccgttatgttgaaagaggttctgatgttgtttttggcgaccaagatgctttgacagcttccactgaaaacggtgtcaagttgagacaaaccgatagattattggatggtgttgctgatggctccatgagatccaaggccgacaggatggccaagatggaaagaagagaaagaaatagacatgccaagcaaggtgaatctgatagacacaatgctgtttccttatccaagcatttattcagtggtaagcgtggtgtcggtaagacagatttccgttga

SEQ ID NO: 11253 - DNA, 1377 bp, Saccharomyces cerevisiae
atggttgccaattgggtacttgctcttacgaggcagtttgaccccttcatgtttatgatggtcatgggtgtcggcatttcatcgaatattctatatagcttcccatatcctgcaaggtggctaagaatatgctcctacatcatgtttgctatcgcttgccttattttcattgctgtgcaggcactacaaatattacatttgattgtctatattaaggagaaaagcttcagagaatattttaatgactttttcagaaatatgaagcacaatttattttggggtacttatcccatggggttagttacaattataaatttcttaggagcactctcgaaagcgaacacgacgaagagccccactaatgccagaaatttgatgatatttgtttacgtcttgtggtggtatgatctcgcagtctgtctagtaatagcgtggggtatctcgtttctcatctggcatgactattaccctttggaagggattgggaattatccttcatataatatcaaaatggcatccgaaaacatgaaaagtgtattgctactggatatcattccgctggttgtcgtcgcttcaagttgtggaacattcacaatgtcagaaatattcttccatgcgtttaatagaaacattcaactgataacgttggtcatatgtgccttaacgtggctgcatgccattatcttcgtcttcatactgattgcgatatacttctggagtctttatattaataagataccaccaatgacacaggttttcaccttattcctgcttttgggcccgatgggccaaggaagttttggagtcttattgcttacagataatataaaaaaatatgcgggcaaatattacccaacagataacattacaagagaacaagagatattgactattgcagttccatggtgtttcaaaattctaggcatggtttctgctatggcattgctcgctatgggctattttttcaccgtgatttctgtcgtttcaatcctgtcgtactacaataaaaaagagattgaaaacgagacaggaaaagtgaagagagtttataccttccacaaaggtttttgggggatgactttcccgatgggtactatgtctttaggaaacgaagagttatatgtgcagtataaccagtacgttcccttatatgcatttagagtcctaggaaccatatacggcggtgtttgcgtttgttggtcaattctatgccttttatgcacattgcatgagtattctaaaaagatgctgcatgctgcccgtaaatcttcattattttcagagtcaggtacggaaaagacgacagtttctccgtataacagcattgaaagcgtggaagaatcaaactcggctctagattttacgcgtttagcataa

SEQ ID NO: 11254 - DNA, 1377 bp, Artificial Sequence
  Description of Artificial Sequence: Synthetic polynucleotide
atggttgccaattgggtacttgctcttacgaggcagtttgaccccttcatgtttatgatggtcatgggtgtcggcatttcttccaatattctttatagcttcccatatcctgcaaggtggttgagaatatgctcctacatcatgtttgctatcgcttgccttattttcattgctgtgcaggcattacaaatattacatttgattgtctatattaaggagaaaagcttcagagaatattttaatgactttttcagaaatatgaagcacaatttattttggggtacttatcccatggggttagttacaattataaatttcttaggagcactctctaaagcgaacacgacgaagagccccactaatgccagaaatttgatgatatttgtttacgtcttgtggtggtatgatctcgcagtctgtttggtaatagcgtggggtatctcttttctcatctggcatgactattaccctttggaagggattgggaattatccttcttataatatcaaaatggcatccgaaaacatgaaaagtgtattgttgttggatatcattccgttggttgtcgtcgcttccagttgtggaacattcacaatgtctgaaatattcttccatgcgtttaatagaaacattcaattgataacgttggtcatatgtgccttaacgtggttacatgccattatcttcgtcttcatattgattgcgatatacttctggagtctttatattaataagataccaccaatgacacaggttttcaccttattcttgcttttgggcccgatgggccaaggaagttttggagtcttattgcttacagataatataaaaaaatatgcgggcaaatattacccaacagataacattacaagagaacaagagatattgactattgcagttccatggtgtttcaaaattttgggcatggtttctgctatggcattgctcgctatgggctattttttcaccgtgatttctgtcgtttccatcttatcttactacaataaaaaagagattgaaaacgagacaggaaaagtgaagagagtttataccttccacaaaggtttttgggggatgactttcccgatgggtactatgtctttaggaaacgaagagttatatgtgcagtataaccagtacgttcccttatatgcatttagagtccttggaaccatatacggcggtgtttgcgtttgttggtctattttgtgccttttatgcacattgcatgagtattctaaaaagatgttgcatgctgcccgtaaatcttctttattttctgagtctggtacggaaaagacgacagtttctccgtataacagcattgaaagcgtggaagaatctaactctgctttagattttacgcgtttagcatga

SEQ ID NO: 11255 - DNA, 1452 bp, Saccharomyces cerevisiae
atgctttctgcaaccaaacaaacatttagaagtctacagataagaactatgtccacgaacaccaagcattacgattacctcgtcatcgggggtggctcagggggtgttgcttccgcaagaagagctgcatcttatggtgcgaagacattactagttgaagctaaggctcttggtggtacctgtgttaacgtgggttgtgttccgaagaaagtcatgtggtatgcttctgacctcgctactagagtatcccatgcaaatgaatatggattatatcagaatcttccattagataaagagcatttgacttttaattggccagaatttaagcagaaaagggatgcttatgtccataggttgaacggtatataccagaagaatttagaaaaagaaaaagtggatgttgtatttggatgggctagattcaataaggacggtaatgttgaagttcagaaaagggataatactactgaagtttactccgctaaccatattttagttgcgaccggtggaaaggctattttccccgaaaacattccaggtttcgaattaggtactgattctgatgggttctttagattggaagaacaacctaagaaagttgttgttgttggcgctggttatattggtattgagctagcaggtgtgttccatgggctgggatccgaaacgcacttggtaattagaggtgaaactgtcttgagaaaatttgatgaatgcatccagaacactattactgaccattacgtaaaggaaggcatcaacgttcataaactatccaaaattgttaaggtggagaaaaatgtagaaactgacaaactgaaaatacatatgaatgactcaaagtccatcgatgacgttgacgaattaatttggacaattggacgtaaatcccatctaggtatgggttcagaaaatgtaggtataaagctgaactctcatgaccaaataattgctgatgaatatcagaacaccaatgttccaaacatttattctctaggtgacgttgttggaaaagttgaattgacacctgtcgctattgcagcgggcagaaagctgtctaatagactgtttggtccagagaaattccgtaatgacaaactagattacgagaacgtccccagcgtaattttctcacatcctgaagccggttccattggtatttctgagaaggaagccattgaaaagtacggtaaggagaatataaaggtctacaattccaaatttaccgccatgtactatgctatgttgagtgagaaatcacccacaagatataaaattgtttgtgcgggaccaaatgaaaaggttgtcggtctgcacattgttggtgattcctctgcagaaatcttgcaagggttcggtgttgctataaagatgggtgccactaaggctgatttcgataattgtgttgctattcatccgactagcgcagaagaattggttactatgagatga

SEQ ID NO: 11256 - DNA, 1452 bp, Artificial Sequence
  Description of Artificial Sequence: Synthetic polynucleotide
atgctttctgcaaccaaacaaacatttagaagtttacagataagaactatgtccacgaacaccaagcattacgattacctcgtcatcgggggtggctctgggggtgttgcttccgcaagaagagctgcatcttatggtgcgaagacattattggttgaagctaaggctcttggtggtacctgtgttaacgtgggttgtgttccgaagaaagtcatgtggtatgcttctgacctcgctactagagtatcccatgcaaatgaatatggattatatcagaatcttccattagataaagagcatttgacttttaattggccagaatttaagcagaaaagggatgcttatgtccataggttgaacggtatataccagaagaatttagaaaaagaaaaagtggatgttgtatttggatgggctagattcaataaggacggtaatgttgaagttcagaaaagggataatactactgaagtttactccgctaaccatattttagttgcgaccggtggaaaggctattttccccgaaaacattccaggtttcgaattaggtactgattctgatgggttctttagattggaagaacaacctaagaaagttgttgttgttggcgctggttatattggtattgagttggcaggtgtgttccatgggttgggatccgaaacgcacttggtaattagaggtgaaactgtcttgagaaaatttgatgaatgcatccagaacactattactgaccattacgtaaaggaaggcatcaacgttcataaactttccaaaattgttaaggtggagaaaaatgtagaaactgacaaattgaaaatacatatgaatgactccaagtccatcgatgacgttgacgaattaatttggacaattggacgtaaatcccatttaggtatgggttctgaaaatgtaggtataaagttgaactctcatgaccaaataattgctgatgaatatcagaacaccaatgttccaaacatttattctttgggtgacgttgttggaaaagttgaattgacacctgtcgctattgcagcgggcagaaagttatctaatagattatttggtccagagaaattccgtaatgacaaattggattacgagaacgtccccagcgtaattttctctcatcctgaagccggttccattggtatttctgagaaggaagccattgaaaagtacggtaaggagaatataaaggtctacaattccaaatttaccgccatgtactatgctatgttgagtgagaaaagtcccacaagatataaaattgtttgtgcgggaccaaatgaaaaggttgtcggtttacacattgttggtgattcctctgcagaaatcttgcaagggttcggtgttgctataaagatgggtgccactaaggctgatttcgataattgtgttgctattcatccgactagcgcagaagaattggttactatgagatga

SEQ ID NO: 11257 - DNA, 711 bp, Saccharomyces cerevisiae
atgaagttgaacatttcttacccagttaacgggtctcaaaagaccttcgaaattgatgatgaacaccgtattcgtgttttcttcgacaagagaatcggtcaagaagtcgatggtgaagccgttggtgacgaattcaagggttacgtcttcaagatctctggtggtaacgacaaacaaggtttcccaatgaagcaaggtgttttgttgccaactagaatcaagttgttgttgaccaagaacgtttcttgttacagaccaagacgtgatggtgaaagaaagagaaagtccgtcagaggtgccattgttggtccagatttggctgtcttggctttggtcattgtcaagaagggtgagcaagaattggaaggtctaactgacactactgttccaaagagattgggtccaaagagagctaacaacatcagaaagttcttcggtttgtccaaggaagatgacgttcgtgatttcgtcatcagaagagaagtcaccaagggtgaaaagacttacaccaaggctccaaagatccaaagattggttactcctcaaagattgcaaagaaagagacaccaaagagctttgaaggtcagaaacgctcaagctcaaagagaagctgctgccgaatacgctcaattgttggctaagagattgtctgaaagaaaggctgagaaggctgaaatcagaaagagaagagcttcttctttgaaggcttaa

SEQ ID NO: 11258 - DNA, 711 bp, Artificial Sequence
  Description of Artificial Sequence: Synthetic polynucleotide
atgaagttgaacatttcttacccagttaacgggtctcaaaagaccttcgaaattgatgatgaacaccgtattcgtgttttcttcgacaagagaatcggtcaagaagtcgatggtgaagccgttggtgacgaattcaagggttacgtcttcaagatctctggtggtaacgacaaacaaggtttcccaatgaagcaaggtgttttgttgccaactagaatcaagttgttgttgaccaagaacgtttcttgttacagaccaagacgtgatggtgaaagaaagagaaagtccgtcagaggtgccattgttggtccagatttggctgtcttggctttggtcattgtcaagaagggtgagcaagaattggaaggtttgactgacactactgttccaaagagattgggtccaaagagagctaacaacatcagaaagttcttcggtttgtccaaggaagatgacgttcgtgatttcgtcatcagaagagaagtcaccaagggtgaaaagacttacaccaaggctccaaagatccaaagattggttactcctcaaagattgcaaagaaagagacaccaaagagctttgaaggtcagaaacgctcaagctcaaagagaagctgctgccgaatacgctcaattgttggctaagagattgtctgaaagaaaggctgagaaggctgaaatcagaaagagaagagcttcttctttgaaggcttga

SEQ ID NO: 11259 - DNA, 2031 bp, Saccharomyces cerevisiae
atgggtagacggaagattgaaatccagagaatttctgatgacagaaatagggctgtcacgtttataaaacgtaaagctggcctttttaagaaggcccatgaactatccgttctttgtcaagtagacatagccgtcattatactggggtccaataacacgttctatgagttttcctctgtggatacgaatgatttaatctatcactaccaaaatgacaaaaacttgcttcacgaagtgaaagatccttccgattatggagactttcacaaaagtgcatccgttaacataaatcaagacctactcaggtcgtctatgtcaaataagccttcgaaatcaaatgttaaaggaatgaaccagtcagaaaatgatgatgatgagaacaatgatgaggacgacgatgatcatggcaattttgagaggaattcaaatatgcattcgaataaaaaagcctctgataaaaatataccgagtgcacacatgaagttgttatccccgaccgcactcatttcaaagatggatggtagtgagcaaaataaacgtcatcctgagaacgcgctgccgcctttacaacatttgaaaagattgaaaccggatcctttgcaaataagtagaactccgcaacagcaacagcagcaaaatatatcgagaccataccatagtagcatgtacaatcttaaccagccttcatccagttcatcttctccttccacgatggattttccaaaattaccaagctttcaaaactcttcctttaatggtcgtcctccacccatttccatttcaccgaacaagttcagtaagccatttacaaatgcatcctcaaggacccctaaacaggagcacaaaattaacaatagtggcagcaataataatgacaacagcaactacactcagtcaccatctaattctttggaagactctattcagcagactgtcaaagcaagaaggaaattgtccgccagaccggtacttcgtgtgagaattccgaacaacaatttcagcagtaattccgctattccaagtgaaccctcctctgcctcctccacatcggccaacggcaatagtatgggctcttcgcagataatgaaagaaaacaaaacaagtaggtctagcaaaatttctccactatccgcatctgcctcaggccccttaactctccaaaaaggtaataatggcagaatggtaataaaattgccaaatgcaaatgcgcctaacggttctaacaatggtaatggcagtaacaataacaatcacccttatcctttcggaagtgggtcttcacctcttttttctgcaacacagccatacattgccactcccttgcaaccatcgaatattcctggcggacctttccaacaaaatacatcttttttagctcaaagacaaacccagcaataccaacaaatgtctttcaaaaaacagagccaaacagtaccattaactacaacattaaccggacgccccccttcaactttttccggccctgaaaccagcaatggccctccaactggttcactgccatcgaagttcgtacatgatttgatgagtaattctccaaatgtttcttctatatcgatgtttccagactggtcaatgggacccaacagtgccaagccgggaaacacaaacaatcctggtactttccctcccgtacagacggccgtaaacaacggcaactccagcaatatcagcagcactaacaacactaacaacaacaacaacaataacaacaacaacagcagcaacaacaacagcaacaacggcaacgacaataacagtaacaatagcaataacagttactatagtaataatgaagatgcacccgtaaatggagctgctatttcagaacatactaccgatggtgactcgaacaatcagtccaactcaagtacatatgatgctgctgccaccgcatataatggaaataccgggctgactccatacataaatactgctcaaacaccactaggcactaaattctttaatttttcgactgatatttcaggagaaaaaaattcaagcaaaatataa

SEQ ID NO: 11260 - DNA, 2031 bp, Artificial Sequence
  Description of Artificial Sequence: Synthetic polynucleotide
atgggtagaagaaagattgaaatccagagaatttctgatgacagaaatagggctgtcacgtttataaaacgtaaagctggcctttttaagaaggcccatgaattatccgttctttgtcaagtagacatagccgtcattatattagggtccaataacacgttctatgagttttcctctgtggatacgaatgatttaatctatcactaccaaaatgacaaaaacttgcttcacgaagtgaaagatccttccgattatggagactttcacaaaagtgcatccgttaacataaatcaagacttactcaggtcttctatgagtaataagccttccaaatctaatgttaaaggaatgaaccagtctgaaaatgatgatgatgagaacaatgatgaggacgacgatgatcatggcaattttgagaggaatagtaatatgcattctaataaaaaagcctctgataaaaatataccgagtgcacacatgaagttgttatccccgaccgcactcatttccaagatggatggtagtgagcaaaataaacgtcatcctgagaacgcgttaccgcctttacaacatttgaaaagattgaaaccggatcctttgcaaataagtagaactccgcaacagcaacagcagcaaaatatatctagaccataccatagtagcatgtacaatcttaaccagccttcttccagttcttcttctccttccacgatggattttccaaaattaccaagctttcaaaactcttcctttaatggtcgtcctccacccatttccatttctccgaacaagttcagtaagccatttacaaatgcatccagcaggacccctaaacaggagcacaaaattaacaatagtggcagcaataataatgacaacagcaactacactcagtctccatctaattctttggaagactctattcagcagactgtcaaagcaagaaggaaattgtccgccagaccggtacttcgtgtgagaattccgaacaacaatttcagcagtaattccgctattccaagtgaaccctcctctgcctcctccacatctgccaacggcaatagtatgggctcttctcagataatgaaagaaaacaaaacaagtaggtctagcaaaatttctccattgtccgcatctgcctctggccccttaactctccaaaaaggtaataatggcagaatggtaataaaattgccaaatgcaaatgcgcctaacggttctaacaatggtaatggcagtaacaataacaatcacccttatcctttcggaagtgggtcttctcctcttttttctgcaacacagccatacattgccactcccttgcaaccatccaatattcctggcggacctttccaacaaaatacatcttttttagctcaaagacaaacccagcaataccaacaaatgtctttcaaaaaacagagccaaacagtaccattaactacaacattaaccggacgccccccttccactttttccggccctgaaaccagcaatggccctccaactggttctttaccatctaagttcgtacatgatttgatgagtaattctccaaatgtttcttctatatccatgtttccagactggtctatgggacccaacagtgccaagccgggaaacacaaacaatcctggtactttccctcccgtacagacggccgtaaacaacggcaactccagcaatatcagcagcactaacaacactaacaacaacaacaacaataacaacaacaacagcagcaacaacaacagcaacaacggcaacgacaataacagtaacaatagcaataacagttactatagtaataatgaagatgcacccgtaaatggagctgctatttctgaacatactaccgatggtgactccaacaatcagtccaacagtagtacatatgatgctgctgccaccgcatataatggaaataccgggttgactccatacataaatactgctcaaacaccattaggcactaaattctttaatttttccactgatatttctggagaaaaaaatagtagcaaaatatga

SEQ ID NO: 11261 - DNA, 1029 bp, Saccharomyces cerevisiae
atggttttagttaagcaggtaagactcggtaactcaggtcttaagatatcaccgatagtgataggatgtatgtcatacgggtccaagaaatgggcggactgggtcatagaggacaagacccaaattttcaagattatgaagcattgttacgataaaggtcttcgtacttttgacacagcagatttttattctaatggtttgagtgaaagaataattaaggagtttctggagtactacagtataaagagagaaacggtggtgattatgaccaaaatttacttcccagttgatgaaacgcttgatttgcatcataacttcactttaaatgaatttgaagaattggacttgtccaaccagcggggtttatccagaaagcatataattgctggtgtcgagaactctgtgaaaagactgggcacatatatagaccttttacaaattcacagattagatcatgaaacgccaatgaaagagatcatgaaggcattgaatgatgttgttgaagcgggccacgttagatacattggggcttcgagtatgttggcaactgaatttgcagaactgcagttcacagccgataaatatggctggtttcagttcatttcttcgcagtcttactacaatttgctctatcgtgaagatgaacgcgaattgattccttttgccaaaagacacaatattggtttacttccatggtctcctaacgcacgaggcatgttgactcgtcctctgaaccaaagcacggacaggattaagagtgatccaactttcaagtcgttacatttggataatctcgaagaagaacaaaaggaaattataaatcgtgtggaaaaggtgtcgaaggacaaaaaagtctcgatggctatgctctccattgcatgggttttgcataaaggatgtcaccctattgtgggattgaacactacagcaagagtagacgaagcgattgccgcactacaagtaactctaacagaagaagagataaagtacctcgaggagccctacaaaccccagaggcaaagatgttaa

SEQ ID NO: 11262 - DNA, 1029 bp, Artificial Sequence
  Description of Artificial Sequence: Synthetic polynucleotide
atggttttagttaagcaggtaagactcggtaacagtggtcttaagatatctccgatagtgataggatgtatgagttacgggtccaagaaatgggcggactgggtcatagaggacaagacccaaattttcaagattatgaagcattgttacgataaaggtcttcgtacttttgacacagcagatttttattctaatggtttgagtgaaagaataattaaggagtttttggagtactacagtataaagagagaaacggtggtgattatgaccaaaatttacttcccagttgatgaaacgcttgatttgcatcataacttcactttaaatgaatttgaagaattggacttgtccaaccagagaggtttatccagaaagcatataattgctggtgtcgagaactctgtgaaaagattgggcacatatatagaccttttacaaattcacagattagatcatgaaacgccaatgaaagagatcatgaaggcattgaatgatgttgttgaagcgggccacgttagatacattggggcttccagtatgttggcaactgaatttgcagaattacagttcacagccgataaatatggctggtttcagttcatttcttctcagtcttactacaatttgctctatcgtgaagatgaacgcgaattgattccttttgccaaaagacacaatattggtttacttccatggtctcctaacgcaagaggcatgttgactcgtcctttgaaccaaagcacggacaggattaagagtgatccaactttcaagtctttacatttggataatctcgaagaagaacaaaaggaaattataaatcgtgtggaaaaggtgagcaaggacaaaaaagtctccatggctatgctctccattgcatgggttttgcataaaggatgtcaccctattgtgggattgaacactacagcaagagtagacgaagcgattgccgcattacaagtaactttgacagaagaagagataaagtacctcgaggagccctacaaaccccagaggcaaagatgttga

SEQ ID NO: 11263 - DNA, 954 bp, Saccharomyces cerevisiae
atgctgttcagctggccttatccagaagccccgattgaaggttattggggcaagccaacttctctgattgattggtgcgaggagaattatgtcgtatccccctatattgcagaatggtcaaatactattaccaatagtatattcttaatgaccgccttctattctacatatagcgcttggcgtaataagttagaaacaaggtatatattgataggaatggggttctcgctggttggtattggttcgtggttatttcatatgactttacagtatcgttatcaattgctagacgaactaccaatgctgtatgcgaccatcatcccatcgtggagtatttttgcagaaactcaagaaatcttgattaaggatgagaagaaaaggaaggaaagctcatttagaatccaaatggtcatttcttttatcatgtgtggtatagtcaccattttaacctggatttacgttgtcgtccaaaagccagcaattttccaagtcctttatggtatattgacgcttctagttgtggttctttctggctggctgacctactatcacgttcatgattcatttgcaaagaaaaatctttttattactatggttatgggcatgattccttttgtcattgggttcatttgctggcaactagatattcacctgtgttctttttggatctatatccggagaacatatttggccctgccattaggtgttctattggaactgcatgcttggtggcatcttttgaccggtactggtgtctatatcttcgtcgtgtatttgcaatatttgagaatattaacccatggaaatccaaatgacttcttatttatatggaggtggggatttttccctgagctggtaagaaagggcttaccgattggtacttcttattcactggagtatctggggccaattgtaaatacacaggtagatgatgaaacaaaaaagaataactaa

SEQ ID NO: 11264 - DNA, 954 bp, Artificial Sequence
  Description of Artificial Sequence: Synthetic polynucleotide
atgcttttcagctggccttatccagaagccccgattgaaggttattggggcaagccaacttctttgattgattggtgcgaggagaattatgtcgtatccccctatattgcagaatggtctaatactattaccaatagtatattcttaatgaccgccttctattctacatatagcgcttggcgtaataagttagaaacaaggtatatattgataggaatggggttctccttggttggtattggttcttggttatttcatatgactttacagtatcgttatcaattgttggacgaattaccaatgctttatgcgaccatcatcccatcttggagtatttttgcagaaactcaagaaatcttgattaaggatgagaagaaaaggaaggaaagctcctttagaatccaaatggtcatttcttttatcatgtgtggtatagtcaccattttaacctggatttacgttgtcgtccaaaagccagcaattttccaagtcctttatggtatattgacgcttttggttgtggttctttctggctggttgacctactatcacgttcatgattcttttgcaaagaaaaatctttttattactatggttatgggcatgattccttttgtcattgggttcatttgctggcaattggatattcacttatgttctttttggatctatatcagaagaacatatttggccttaccattaggtgttttattggaattacatgcttggtggcatcttttgaccggtactggtgtctatatcttcgtcgtgtatttgcaatatttgagaatattaacccatggaaatccaaatgacttcttatttatatggaggtggggatttttccctgagttggtaagaaagggcttaccgattggtacttcttattctttggagtatttggggccaattgtaaatacacaggtagatgatgaaacaaaaaagaataactga

SEQ ID NO: 11265 - DNA, 1674 bp, Saccharomyces cerevisiae
atggctcgtcatggaaaaggcccaaaaactaacaaaaaaaagctagcacctgaaaaggaaaggtttatacaatgttgtgctgatatcacattagagttaacagattctttaacctcgggaacaacaagagaaattaatctgaatggtttgattactaaatattcaaagaaatataaactaaagcaacaaccaaggttaaccgatatcattaattctattccagaccaatacaaaaaatatttattacccaaattgaaggctaagccagtaagaacagcatcgggtattgcagtggtagccgttatgtgtaaaccacatcgttgtcctcacattgcatatacaggtaatatttgtgtttattgtccaggtggtccagattcagattttgagtattctacacaatcttacacaggctatgaaccaacttcaatgcgtgccatcagagctcgttatgacccttatgaacaagcacgtggtagggtggaacaattgaaacagttaggtcactccatcgataaagtcgaatatgttctgatgggtggtacatttatgtcattaccaaaagaatatcgtgaagattttattgtgaaattgcataatgcactttctgggttcaatggtaatgatattgatgaagctattctttattcgcaacaaagtttaacgaagtgtgttggtataacaatcgaaactaggcctgattattgtacgcaaacacatttggacgatatgttaaaatatggctgtaccagattagaaattggtgttcagtccttgtacgaagacgttgctcgtgatactaatagaggacacaccgttaggtctgtttgtgaaacttttgctgtgtctaaagatgctggttataaggttgtttctcacatgatgccagatttaccaaatgttgggatggaaagagatattgaacagttcaaagagtattttgaaaatcctgattttaggactgatgggttgaaaatctatccaactttagtcattaggggtacaggtttatacgaactttggaaaacgggcaggtataagtcttatagtgccaacgccttagtggacttagttgctagaatcttggccctagtgcccccatggacaagaatctaccgtgtccaaagagacattccaatgcccttggttacctcaggtgttgacaatggtaacttgagagaattggcattagctagaatgaaggacttgggtacaacttgtagggatgttcgtactagggaagtgggtatccaagaagtgcatcataaagttcaaccagatcaggtcgagcttatcagaagggattactatgcaaatggtggttgggaaacctttttatcatatgaagatccaaagaaagatatactgattggtttgctgagattgagaaaggcttcaaagaaatatacatatagaaaagaattcacctcccagaggacttctattgttagagaattgcatgtttatggttctgtggttccacttcattcaagagatcctcgtaaattccagcatcaagggtttggtactctattgatggaagaagcggaaagaatcgccaaggaagagcatggttcagagaaaatttctgttatttctggtgttggtgtaagaaattactatggtaaactaggatatgaactagacggtccatacatgtcgaaaagaatttaa

SEQ ID NO: 11266 - DNA, 1674 bp, Artificial Sequence
  Description of Artificial Sequence: Synthetic polynucleotide
atggctcgtcatggaaaaggcccaaaaactaacaaaaaaaagttagcacctgaaaaggaaaggtttatacaatgttgtgctgatatcacattagagttaacagattctttaacctctggaacaacaagagaaattaatttgaatggtttgattactaaatattccaagaaatataaattgaagcaacaaccaaggttaaccgatatcattaattctattccagaccaatacaaaaaatatttattacccaaattgaaggctaagccagtaagaacagcatctggtattgcagtggtagccgttatgtgtaaaccacatcgttgtcctcacattgcatatacaggtaatatttgtgtttattgtccaggtggtccagattctgattttgagtattctacacaatcttacacaggctatgaaccaacttctatgcgtgccatcagagctcgttatgacccttatgaacaagcacgtggtagggtggaacaattgaaacagttaggtcactccatcgataaagtcgaatatgttttgatgggtggtacatttatgtctttaccaaaagaatatcgtgaagattttattgtgaaattgcataatgcactttctgggttcaatggtaatgatattgatgaagctattctttattctcaacaaagtttaacgaagtgtgttggtataacaatcgaaactaggcctgattattgtacgcaaacacatttggacgatatgttaaaatatggctgtaccagattagaaattggtgttcagtccttgtacgaagacgttgctcgtgatactaatagaggacacaccgttaggtctgtttgtgaaacttttgctgtgtctaaagatgctggttataaggttgtttctcacatgatgccagatttaccaaatgttgggatggaaagagatattgaacagttcaaagagtattttgaaaatcctgattttaggactgatgggttgaaaatctatccaactttagtcattaggggtacaggtttatacgaactttggaaaacgggcaggtataagtcttatagtgccaacgccttagtggacttagttgctagaatcttggccttagtgcccccatggacaagaatctaccgtgtccaaagagacattccaatgcccttggttacctctggtgttgacaatggtaacttgagagaattggcattagctagaatgaaggacttgggtacaacttgtagggatgttcgtactagggaagtgggtatccaagaagtgcatcataaagttcaaccagatcaggtcgagcttatcagaagggattactatgcaaatggtggttgggaaacctttttatcttatgaagatccaaagaaagatatattgattggtttgttaagattgagaaaggcttccaagaaatatacatatagaaaagaattcacctcccagaggacttctattgttagagaattgcatgtttatggttctgtggttccacttcattccagagatcctcgtaaattccagcatcaagggtttggtactttattgatggaagaagcggaaagaatcgccaaggaagagcatggttctgagaaaatttctgttatttctggtgttggtgtaagaaattactatggtaaattaggatatgaattagacggtccatacatgtccaaaagaatttga

SEQ ID NO: 11267 - DNA, 6588 bp, Saccharomyces cerevisiae
atgacacctgaagccaagaaaaggaaaaaccaaaagaagaagttgaagcaaaagcaaaaaaaagctgctgagaaagctgctagccacagtgaagaaccacttgaattaccagaaagtacgattaacagcagcttcaacgacgactcggtgaaccgtacagaatctgacatagcttcaaaatctgatgttcctccggtctcatcatctaccaatatctctccggctaatgaaacacaactagaaatacctgatactcaagaattgcatcataaactgctcaacgactctgatcaacatgatattaccgcggactcaaatgatttgccagacaactcaatcgttgaacatgactctgttattacccaaacaaaaccagccatgtctcaagaatacgaagagactgccgctcacttatcttcgagaaatccatcgctcgatgtagtcgcgggagaacttcacaataataatgaacatacccagaaaattgccgtatccgctgtggaagaggattctttcaatgaagaagagggtgaaaatcacgacagcataataatttcatcattaaacgatgctaccccttctcaatataatcattttctcccatccgatggcaatcttctttctccagaattatcttctggtgatacgccaactcacaatgttcctctaggcacaaaagacaatgaaataaatgacgatgagtattgtaatgataaggaaattagtttgaacgcaaataatgtgcttcctgatgaactttcaaaggaagaagatgaaagattaaaactagaaacgcatgtatcaaccgaagaaaagaaacaggatatcgctgatcaggaaactgcagaaaacttatttacgtctagtacagaaccatctgagaataaaataagaaattctggtgatgatacctccatgttgtttcaagatgacgaaagtgatcagaaggttccatgggaggaagatgtgaagaaagattttcataatgagaacacaaataatactcaagaatcggcaccgaacacagatgatcgtgataagggttatgaaggaaacgaagctttgaaaaagtccgaaagttgtacagccgcggacgagaggtcgtactctgaagaaacttcagaagatatctttcacggacacgacaaacaggtagttgaaggccaaaatgatttcactgggaaaaatattgagaatgaaagccagaaattaatgggggaagggaatcataagttaccgttgtctgccgaagctgacattatagaacctggtaaggatattcaagatcaagccgaggatttgtttacgcagagcagcggagacttgggagaagttttgccatgggaatctactgataaaaacgctgatgtaacgagcaaatcccaagagaaacatgaagatttatttgctgcttctggaaacgatgagaaacttccttgggaagtttctgacggtgaagtatcatcgggaaagacggaaaacagcatgcagactagtactgagaaaatagctgagcaaaagttttcgtttttggaaaacgacgacgaccttttggacgacgacgacagctttttggcttcttctgaggaagaagacacagtacctaataccgataatacaacgaatttaacctcaaaaccagttgaagaaaaaaaggcttcaagatataaacctattatcgaggaggaagcaggaatgcgtcaagagcaagttcattttaccaatactactggcattgtaacaccgcagcagttccacggtttgactaaaactggactaggcacccccaaccaacaagtcagtgtaccaaatatagttagtcctaagcctcctgtggtaaaagacaatcgttcaaattttaagataaatgaggagaaaaagaagtctgatgcttacgattttccactggaaattatttcagaaagttccaagaagggtcacgcaaagccggttgccgttcctactcaaaggtttggctcagggaattcttttagttctttggacaaaccaattccacagagcaggaaaggctctaataactcaaataggccacccgtgatcccattggggacgcaggagcctcgatcttcgagaactaactcagcgatctcgcaatctcccgttaattatgctttccctaacccatacaaaattcaacaactacaacaggctcctatccaatcaggtatgcctttaccaaataccaacatacctcccccagcattaaaagtggaaaccaccgtttctgctcctccaattcgggcaagaggggtcagcaatgcctccgtgggaagttcagcgtcttttggtgctagacatgcaacacagtacggcctcaataacggggtacctccggtttcgccatatggtcaagctaccataaatttgccaactgcgaataagtatgcccccgtctctcctacagttcagcagaagcaatatccatcagttgtgcaaaaccttggcgcttcggccgtaaatacccccaattttgtaaagacccatagaggccatacaagctctattagttcgtatacaccaaaccagaatgaacacgcctctagatacgcacccaactatcaacaatcttatcaggtgccatatacctcacaacctgttggtcctgtagctgggaattcaagctatcaaagccaaacccgaagttcttatgcagttcctatgatgccccaggctcaaacttcagcaagtattcagcctcacgcgaacattcaaccgcctactggcattttacctttagcccccttacgacctctagaccccttacaagccgctacgaacttgcaaccccgtgcaagcaacataacggctgcaaattcactacctcttgcaaatttgccacttgctgaaaacatactgccagaaattatcacgcatcgagctacaagtagtgttgcaccaccacgacaggaaaataatccaattaaaatagacaacgaggctttattacgccgtcaatttccgatttttcattggagtgctgcaaacaaggtcgtgtacgcagtcccccctatccctgaccaatcgcagtacatgatttcatcaagcattgtacaggaaataaaagtgacaccaattgaccagataattaaaccgaacgatatgctcaaaagcttcccaggtcctttgggtagtgccaaattaaaaaaaaaggatttaaccaaatggatggaaaccactattaaatccatatctgaaaatgaatcatccactgatatgactatatggcaactattggaaatgaaactaaacgataaagttaactggaaaaatatttcaaaactactatacaattctgacgaacttttaatgtacctatctcagccctttccaaacggtgacatgattccaaatgcatatagactggatataaattgtcagatgagagtcctggcgttcttacaaacgggaaatcacgatgaggcacttcgcttagctttaagcaagagggattatgccattgcactattggttggcagtttaatgggtaaagacagatggtctgaagtcattcagaaatatttatatgaagggtttactgcggggccaaacgaccaaaaagaattggcacactttctgctccttatctttcaagtatttgttggtaactccaaaatggccataaaaagtttctacactaataatgagaccagtcaatgggcatccgaaaactggaagagtatcgttgcagctgttctgattaatatcccagaaaataatgaagatccactacttataccacctgttgtccttgaatttttgatagagttcggtatattcctcaccaaaaagggcttgacagccgcagctagtacattatttattattggtaacgtaccactttctaatgagccagtaatggcagattcagacgttatatttgaaagtattggaaacatgaatacttttgaaagcattctatgggatgaaatctacgagtatatattctcgtatgaccctaaattcaaaggattttcatctattttgccccagaagatataccatgcatctcttttacaagaacaaggtttgaacagcctggggacaaagtatactgattacctcagttcctcagttcgaaaactgcctaagaaagatattttaacaataaacctcactcgtgaattgagtgaggtggctagtaggctttccgagtctaatacaggatggcttgcaaaaccaaaactaagcagcgtatggggtcaattagataaatccttcaataaatatattggtggcgatgatattgatgcattgaataaaaaaaatgataaaaagaaagtttttgatgggttcacaccgggatcttctgccaattcgtcaactgtggatctcacccaaacattcacacctttccaagctcaagttacttcgcaaagctatgtggatactacagctcttttgcataatgcccataatgtaccaagccatagtgtgctgcattcaaagccttccaatgtgtcaaaggggttagttgaagcaaacttaccgtatacgcataggatcggtgatagtttgcagggatctcctcagcgcattcataatacacagttcgctgctgctgagcctcaaatggcttctttgagaagagttagaacagaccagcatacaaacgaaaaggctttgaagagtcagcagattttagagaaaaagtctacggcctacactccacaatttggacagaaccatagcgttccaatggaaaagtctaattcgaatgtgccatctttatttgccgacttccctgctccacccaaacttggaacagtgccgtctaattatgtgtctagtcctgacttagtaagaagggagtctatcatatctaccggatcagaatttcttcctcctcccaaaattggggtacctactaaagctaattcctcgcagggatcgcttatgtactcaccaagtgtggaagctttgcctatcgaccctgtcgtcccgcaagttcatgagacgggatacaatgattttggtaacaaacattctcaaaaaagtatgcctgaagatgaatctcacacatcacatgataatagcaatgctgatcaaaatacattaaaagactctgcagatgttacagatgaaacaatggatattgaaggacctggcttcaacgatgtgaagaatcttcttcctatggagcccaaccaccagcctacgtctacagtaaatcctatacaaactattagtgacgatatccaaccgattcttcaaactaacgtggaggtccggggtactgatgcatcgaaaatggaaaattcacttccctccattgaaaatgaaagaagtagcgaggagcagccagaaaacatttcaaaatcagcatcatcagcatatttaccatcaactggtggattgtcactcgaaaacagaccgctaactcaggatgaaaacagtatctcagagacagttcaatccacatacttgccagcaggaagtatttcaatggaagctaaaccaatttctcaagtgcaagatgttccaagaaatgttaataataaagcatccaaacttgtggagcaacatatggcaccaccaaagccaaaaagtactgacgcaaccaaaatgaactactcaccatacgtgcctcaatcaactgccgctagtgcagatggcgatgaatcaacgattctgaaaacatcgcctgctatatatgcaagaactcaccaagcacatgcatccaatccatcacaatactttcctttggtcaaccaagcaaatgaaactgcttcattcgaattatctgaatcaacatcccaggcacaaagtaatggaaatgttgcttcagaaaatagattcagcccaataaagaaagccgaagtcgtcgagaaagacacttttcaacctactattaggaaggcttcaactaaccaatacagggcttttaaaccgttggaatcagatgcggataaatacaatgacgttattgaagatgaatccgatgacgacaatatgtctactgatgaggcaaagaacagaaaggaagaaaaaaagaatgtgaatatgaaaaaggaaacaaaaccaagtaacaaggacatagatgacaagtctaatggttggtttggttggttgaagaaagatactggcgacaaaaaagtgtataaggccaagctaggtcataaaaacacactatactatgatgaaaaattgaaacgttgggtgaataaggacgcaaccgaagaggaaaaacaaaaaattattgaaagttcggcaccaccacctcctccaatcgtgaaacgtaaagatggcggcccaaagacaaagccacgttcaggccccatcaataattccctacctccagtacatgccacatcagttattccgaacaatccaatcactggtgagcctttgccgatcaaaacatccccttctcctacaggacccaatccaaacaattctccatcaccatcctctcccatatcaaggatttctggcgtaaacttgactagcaaaaaggcaaacggtttggatgatttattgagtttggcaggaggacccaaaccagcaagtacgagaaggaagaagaaaacagcgagaggctatgttaatgtaatggataacatacaataa

SEQ ID NO: 11268 - DNA, 6588 bp, Artificial Sequence
  Description of Artificial Sequence: Synthetic polynucleotide
atgacacctgaagccaagaaaaggaaaaaccaaaagaagaagttgaagcaaaagcaaaaaaaagctgctgagaaagctgctagccacagtgaagaaccacttgaattaccagaaagtacgattaacagcagcttcaacgacgactctgtgaaccgtacagaatctgacatagcttccaaatctgatgttcctccggtcagttcttctaccaatatctctccggctaatgaaacacaattggaaatacctgatactcaagaattgcatcataaattactcaacgactctgatcaacatgatattaccgcggactctaatgatttgccagacaactctatcgttgaacatgactctgttattacccaaacaaaaccagccatgtctcaagaatacgaagagactgccgctcacttatcttctagaaatccatctctcgatgtagtcgcgggagaacttcacaataataatgaacatacccagaaaattgccgtatccgctgtggaagaggattctttcaatgaagaagagggtgaaaatcacgacagcataataatttcttctttaaacgatgctaccccttctcaatataatcattttctcccatccgatggcaatcttctttctccagaattatcttctggtgatacgccaactcacaatgttcctttgggcacaaaagacaatgaaataaatgacgatgagtattgtaatgataaggaaattagtttgaacgcaaataatgtgcttcctgatgaactttccaaggaagaagatgaaagattaaaattagaaacgcatgtatctaccgaagaaaagaaacaggatatcgctgatcaggaaactgcagaaaacttatttacgtctagtacagaaccatctgagaataaaataagaaattctggtgatgatacctccatgttgtttcaagatgacgaaagtgatcagaaggttccatgggaggaagatgtgaagaaagattttcataatgagaacacaaataatactcaagaaagtgcaccgaacacagatgatcgtgataagggttatgaaggaaacgaagctttgaaaaagtccgaaagttgtacagccgcggacgagaggtcttactctgaagaaacttctgaagatatctttcacggacacgacaaacaggtagttgaaggccaaaatgatttcactgggaaaaatattgagaatgaaagccagaaattaatgggggaagggaatcataagttaccgttgtctgccgaagctgacattatagaacctggtaaggatattcaagatcaagccgaggatttgtttacgcagagcagcggagacttgggagaagttttgccatgggaatctactgataaaaacgctgatgtaacgagcaaatcccaagagaaacatgaagatttatttgctgcttctggaaacgatgagaaacttccttgggaagtttctgacggtgaagtatcttctggaaagacggaaaacagcatgcagactagtactgagaaaatagctgagcaaaagttttcttttttggaaaacgacgacgaccttttggacgacgacgacagctttttggcttcttctgaggaagaagacacagtacctaataccgataatacaacgaatttaacctccaaaccagttgaagaaaaaaaggcttccagatataaacctattatcgaggaggaagcaggaatgcgtcaagagcaagttcattttaccaatactactggcattgtaacaccgcagcagttccacggtttgactaaaactggattgggcacccccaaccaacaagtcagtgtaccaaatatagttagtcctaagcctcctgtggtaaaagacaatcgttccaattttaagataaatgaggagaaaaagaagtctgatgcttacgattttccattggaaattatttctgaaagttccaagaagggtcacgcaaagccggttgccgttcctactcaaaggtttggctctgggaattcttttagttctttggacaaaccaattccacagagcaggaaaggctctaataacagtaataggccacccgtgatcccattggggacgcaggagcctagatcttctagaactaactctgcgatctctcaatctcccgttaattatgctttccctaacccatacaaaattcaacaattacaacaggctcctatccaatctggtatgcctttaccaaataccaacatacctcccccagcattaaaagtggaaaccaccgtttctgctcctccaattagagcaagaggggtcagcaatgcctccgtgggaagttctgcgtcttttggtgctagacatgcaacacagtacggcctcaataacggggtacctccggtttctccatatggtcaagctaccataaatttgccaactgcgaataagtatgcccccgtctctcctacagttcagcagaagcaatatccatctgttgtgcaaaaccttggcgcttctgccgtaaatacccccaattttgtaaagacccatagaggccatacaagctctattagttcttatacaccaaaccagaatgaacacgcctctagatacgcacccaactatcaacaatcttatcaggtgccatatacctctcaacctgttggtcctgtagctgggaatagtagctatcaaagccaaaccagaagttcttatgcagttcctatgatgccccaggctcaaacttctgcaagtattcagcctcacgcgaacattcaaccgcctactggcattttacctttagcccccttaagacctttggaccccttacaagccgctacgaacttgcaaccccgtgcaagcaacataacggctgcaaattctttgcctcttgcaaatttgccacttgctgaaaacatattgccagaaattatcacgcatagagctacaagtagtgttgcaccaccaagacaggaaaataatccaattaaaatagacaacgaggctttattacgccgtcaatttccgatttttcattggagtgctgcaaacaaggtcgtgtacgcagtcccccctatccctgaccaatctcagtacatgatttcttctagcattgtacaggaaataaaagtgacaccaattgaccagataattaaaccgaacgatatgctcaaaagcttcccaggtcctttgggtagtgccaaattaaaaaaaaaggatttaaccaaatggatggaaaccactattaaatccatatctgaaaatgaatcttccactgatatgactatatggcaattattggaaatgaaattgaacgataaagttaactggaaaaatatttccaaattattgtacaattctgacgaacttttaatgtacttgtctcagccctttccaaacggtgacatgattccaaatgcatatagattagatataaattgtcagatgagagtcttggcgttcttacaaacgggaaatcacgatgaggcacttcgcttagctttaagcaagagggattatgccattgcattattggttggcagtttaatgggtaaagacagatggtctgaagtcattcagaaatatttatatgaagggtttactgcggggccaaacgaccaaaaagaattggcacactttttactccttatctttcaagtatttgttggtaactccaaaatggccataaaaagtttctacactaataatgagaccagtcaatgggcatccgaaaactggaagagtatcgttgcagctgttttgattaatatcccagaaaataatgaagatccattacttataccacctgttgtccttgaatttttgatagagttcggtatattcctcaccaaaaagggcttgacagccgcagctagtacattatttattattggtaacgtaccactttctaatgagccagtaatggcagattctgacgttatatttgaaagtattggaaacatgaatacttttgaaagcattttatgggatgaaatctacgagtatatattctcttatgaccctaaattcaaaggattttcttctattttgccccagaagatataccatgcatctcttttacaagaacaaggtttgaacagcttagggacaaagtatactgattacctcagttcctctgttagaaaattacctaagaaagatattttaacaataaacctcactcgtgaattgagtgaggtggctagtaggctttccgagtctaatacaggatggcttgcaaaaccaaaattaagcagcgtatggggtcaattagataaatccttcaataaatatattggtggcgatgatattgatgcattgaataaaaaaaatgataaaaagaaagtttttgatgggttcacaccgggatcttctgccaattcttctactgtggatctcacccaaacattcacacctttccaagctcaagttacttctcaaagctatgtggatactacagctcttttgcataatgcccataatgtaccaagccatagtgtgttacattctaagccttccaatgtgagcaaggggttagttgaagcaaacttaccgtatacgcataggatcggtgatagtttgcagggatctcctcagcgcattcataatacacagttcgctgctgctgagcctcaaatggcttctttgagaagagttagaacagaccagcatacaaacgaaaaggctttgaagagtcagcagattttagagaaaaagtctacggcctacactccacaatttggacagaaccatagcgttccaatggaaaagtctaatagtaatgtgccatctttatttgccgacttccctgctccacccaaacttggaacagtgccgtctaattatgtgtctagtcctgacttagtaagaagggagtctatcatatctaccggatctgaatttcttcctcctcccaaaattggggtacctactaaagctaattcctctcagggatctcttatgtactctccaagtgtggaagctttgcctatcgaccctgtcgtcccgcaagttcatgagacgggatacaatgattttggtaacaaacattctcaaaaaagtatgcctgaagatgaatctcacacatctcatgataatagcaatgctgatcaaaatacattaaaagactctgcagatgttacagatgaaacaatggatattgaaggacctggcttcaacgatgtgaagaatcttcttcctatggagcccaaccaccagcctacgtctacagtaaatcctatacaaactattagtgacgatatccaaccgattcttcaaactaacgtggaggtcagaggtactgatgcatccaaaatggaaaattctcttccctccattgaaaatgaaagaagtagcgaggagcagccagaaaacatttccaaatctgcatcttctgcatatttaccatctactggtggattgtctctcgaaaacagaccgttgactcaggatgaaaacagtatctctgagacagttcaatccacatacttgccagcaggaagtatttccatggaagctaaaccaatttctcaagtgcaagatgttccaagaaatgttaataataaagcatccaaacttgtggagcaacatatggcaccaccaaagccaaaaagtactgacgcaaccaaaatgaactactctccatacgtgcctcaatctactgccgctagtgcagatggcgatgaaagtacgattttgaaaacatctcctgctatatatgcaagaactcaccaagcacatgcatccaatccatctcaatactttcctttggtcaaccaagcaaatgaaactgcttctttcgaattatctgaatctacatcccaggcacaaagtaatggaaatgttgcttctgaaaatagattcagcccaataaagaaagccgaagtcgtcgagaaagacacttttcaacctactattaggaaggcttccactaaccaatacagggcttttaaaccgttggaaagtgatgcggataaatacaatgacgttattgaagatgaatccgatgacgacaatatgtctactgatgaggcaaagaacagaaaggaagaaaaaaagaatgtgaatatgaaaaaggaaacaaaaccaagtaacaaggacatagatgacaagtctaatggttggtttggttggttgaagaaagatactggcgacaaaaaagtgtataaggccaagttgggtcataaaaacacattgtactatgatgaaaaattgaaacgttgggtgaataaggacgcaaccgaagaggaaaaacaaaaaattattgaaagttctgcaccaccacctcctccaatcgtgaaacgtaaagatggcggcccaaagacaaagccacgtagcggccccatcaataattccttacctccagtacatgccacatctgttattccgaacaatccaatcactggtgagcctttgccgatcaaaacatccccttctcctacaggacccaatccaaacaattctccatctccatcctctcccatatctaggatttctggcgtaaacttgactagcaaaaaggcaaacggtttggatgatttattgagtttggcaggaggacccaaaccagcaagtacgagaaggaagaagaaaacagcgagaggctatgttaatgtaatggataacatacaatga

SEQ ID NO: 11269 - DNA, 2535 bp, Saccharomyces cerevisiae
atgaaaccttacttatttgacctaaagctaaaagacacagagaagctggattggaaaaaaggcctctcctcatatctcaagaaatcatacggctcctcacaatggagaacattttatgatgagaaagctacttcagaactggatcacttaaggaataatgcaaatggagaactagcaccttcttcattgtcggaacaaaatctaaaatattactcatttttggagcatctttattttcgcctgggtagcaaaggatcaagattaaaaatggatttcacttggtatgacgcagaatactcatcggcccagaaaggattgaaatacacgcaacatacgttagcatttgaaaagtcttgtactttgttcaacattgctgtaatctttacccaaattgcgagggagaatatcaatgaggactacaaaaactcaatcgcaaatttgacaaaagctttttcctgttttgaatatctatcagaaaattttttgaactcaccttcagtcgatcttcagtcagaaaacactaggtttctggctaatatttgccatgcagaagctcaagaattgtttgtcttgaaattattaaatgatcaaatatcatccaagcaatatacattaatcagtaaactttctagagccacgtgtaacctctttcagaaatgtcacgattttatgaaagaaatagatgacgatgtggccatttatggtgaacccaaatggaaaacgacagttacttgcaaactgcatttctacaaatcgttaagcgcttattatcacggtttacaccttgaagaagaaaatagagttggcgaagcaattgcttttctcgatttttctatgcaacaattgatttcatcccttccattcaaaacgtggttagtggaatttatagactttgatgggtttaaagaaactttagaaaagaaacaaaaggagttgattaaagataacgattttatatatcatgaaagcgttccagccgttgtgcaggttgattccattaaggcgctcgatgcaataaaatctccaacatgggagaagatattagaaccatatatgcaagatgttgcaaataaatgtgactctttgtacagaggaattattcccctagatgtctatgaaaaggaaagtatttactcagaagaaaaagcgacgctgttgagaaagcaagttgaagaaactgagacagcaaatttggaatattcttccttcatcgaatttacaaatctacccaggctcttgagtgatttggaaaaacaatttagtgacggaaatattttctcgaatacggatacacagggacaattgatgagggaccaaattcagacatggtgtaaatttatccaaacaaatgaatttagggatatagaagaacagatgaacaaaattgttttcaaaaggaaacaaattttagaaatcctttctgccttacccaatgatcaaaaagaaaatgttacaaaactaaaatcttctttagtagctgcttcaaactcagacgaaaaattgttcgcatgcgtaaaaccacatattgtcgagatcaatctattgaatgacaatggaaaaatatggaagaagtttgacgaatttaatcgcaatacgcctccacaacctagcctattggatatcgatgataccaaaaacgacaagatattagagttgttaaaacaagtaaagggccatgcggaagacttaagaacattgaaagaggaacgttcgagaaatttgtctgaactaagagacgaaatcaacaacgatgatatcacaaaattattaattattaataaggggaaatccgatgttgagctcaaagatttattcgaggtggaactggagaaattcgagcctttgagcacaagaatagaggcgacaatttacaaacaatcttcaatgatagatgacatcaaagccaagctagatgaaatttttcacctttcaaatttcaaggataaatcttctggggaagaaaaatttttagaagatcgtaagaatttttttgataagctgcaagaagcagtgaaatcattcagtatttttgcatccgacttgccaaaaggaatagagttctatgattcattattcaatatgagtagagacttagcagaaagagtgagagttgcaaagcagaccgaggattcaacagctaattctcccgctcctcccctccctccacttgattctaaagcgtctgtcgttgggggtcctccattactgccccaaaaaagtgcagcctttcagtcattatctagacaagggctcaatttaggggaccaatttcaaaatctcaaaataagtgccggcagtgatttacctcaaggacccggtattccaccaagaacttatgaagcttcgccatatgctgcaacgcctactatggcagccccaccagtaccaccgaaacaatcgcaagaggatatgtacgacttgagaagacgtaaagcagttgaaaacgaagaacgtgaactgcaagagaatcctacgtccttttacaatagaccctctgtttttgatgaaaatatgtactccaaatacagcagttag

SEQ ID NO: 11270 - DNA, 2535 bp, Artificial Sequence
  Description of Artificial Sequence: Synthetic polynucleotide
atgaaaccttacttatttgacttgaagttgaaagacacagagaagttggattggaaaaaaggcctctccagctatctcaagaaatcttacggctcctctcaatggagaacattttatgatgagaaagctacttctgaattagatcacttaaggaataatgcaaatggagaattggcaccttcttctttgagtgaacaaaatttgaaatattactcttttttggagcatctttattttcgcttgggtagcaaaggaagcagattaaaaatggatttcacttggtatgacgcagaatactcttctgcccagaaaggattgaaatacacgcaacatacgttagcatttgaaaagtcttgtactttgttcaacattgctgtaatctttacccaaattgcgagggagaatatcaatgaggactacaaaaactctatcgcaaatttgacaaaagctttttcctgttttgaatatttatctgaaaattttttgaactctccttctgtcgatcttcagtctgaaaacactaggtttttggctaatatttgccatgcagaagctcaagaattgtttgtcttgaaattattaaatgatcaaatatcttccaagcaatatacattaatcagtaaactttctagagccacgtgtaacctctttcagaaatgtcacgattttatgaaagaaatagatgacgatgtggccatttatggtgaacccaaatggaaaacgacagttacttgcaaattgcatttctacaaatctttaagcgcttattatcacggtttacaccttgaagaagaaaatagagttggcgaagcaattgcttttctcgatttttctatgcaacaattgatttcttcccttccattcaaaacgtggttagtggaatttatagactttgatgggtttaaagaaactttagaaaagaaacaaaaggagttgattaaagataacgattttatatatcatgaaagcgttccagccgttgtgcaggttgattccattaaggcgctcgatgcaataaaatctccaacatgggagaagatattagaaccatatatgcaagatgttgcaaataaatgtgactctttgtacagaggaattattcccttagatgtctatgaaaaggaaagtatttactctgaagaaaaagcgacgttattgagaaagcaagttgaagaaactgagacagcaaatttggaatattcttccttcatcgaatttacaaatttgcccaggctcttgagtgatttggaaaaacaatttagtgacggaaatattttcagtaatacggatacacagggacaattgatgagggaccaaattcagacatggtgtaaatttatccaaacaaatgaatttagggatatagaagaacagatgaacaaaattgttttcaaaaggaaacaaattttagaaatcctttctgccttacccaatgatcaaaaagaaaatgttacaaaattgaaatcttctttagtagctgcttctaacagcgacgaaaaattgttcgcatgcgtaaaaccacatattgtcgagatcaatttattgaatgacaatggaaaaatatggaagaagtttgacgaatttaatcgcaatacgcctccacaacctagccttttggatatcgatgataccaaaaacgacaagatattagagttgttaaaacaagtaaagggccatgcggaagacttaagaacattgaaagaggaacgttccagaaatttgtctgaattgagagacgaaatcaacaacgatgatatcacaaaattattaattattaataaggggaaatccgatgttgagctcaaagatttattcgaggtggaattagagaaattcgagcctttgagcacaagaatagaggcgacaatttacaaacaatcttctatgatagatgacatcaaagccaagttggatgaaatttttcacctttctaatttcaaggataaatcttctggggaagaaaaatttttagaagatcgtaagaatttttttgataagttacaagaagcagtgaaatctttcagtatttttgcatccgacttgccaaaaggaatagagttctatgattctttattcaatatgagtagagacttagcagaaagagtgagagttgcaaagcagaccgaggattctacagctaattctcccgctcctcccctccctccacttgattctaaagcgtctgtcgttgggggtcctccattattgccccaaaaaagtgcagcctttcagtctttatctagacaagggctcaatttaggggaccaatttcaaaatctcaaaataagtgccggcagtgatttacctcaaggacccggtattccaccaagaacttatgaagcttctccatatgctgcaacgcctactatggcagccccaccagtaccaccgaaacaatctcaagaggatatgtacgacttgagaagacgtaaagcagttgaaaacgaagaacgtgaattacaagagaatcctacgtccttttacaatagaccctctgtttttgatgaaaatatgtactccaaatacagcagttga

SEQ ID NO: 11271 - DNA, 1404 bp, Saccharomyces cerevisiae
atgcaattcgctgggaagaaaactgatcaagtgaccacatctaatccgggctttgaagaagaagaagaagaagaagaagaactacaacaagattggtcgcaactcgcatcgctcgttagcaaaaatgctgctctttcacttccaaagaggggtgaaaaagactatgaaccagatgggactaatttgcaagatctgcttctctataatgcaagtaaagccatgtttgataccatatcagactcaataagaggcacaacagtaaaatctgaagtaagaggatactatgttccccataaacatcaagccgttctacttaaacccaaaggcagctttatgcaaacgatgggaagggctgatagcacaggcgaactctggcttgacttccatgagtttgtttatttggcagagagaggcactattcttccttattatagattagaagcaggctctaacaaaagctcaaagcacgaaacagagattttactcagtatggaggatttgtattcgctgttttcatcgcaacaggaaatggaccaatattttgtgtttgctcatttaaaaaggttgggttttattctaaaacccagcaatcaagaagcagcagtcaagacttcctttttcccattgaaaaagcaacgaagtaatttacaagcaatcacttggagattactttcattgtttaaaatacaagagttatcgctgtttagtggtttcttctattctaagtggaattttttttttcgtaaatatacgacttcaccacagttataccagggtttaaataggcttgttcgttccgtggctgtaccaaagaataaaaaagagctattggatgcacaatctgatagggaatttcaaaaggtaaaggatattcccttgacatttaaagtatggaaaccccattctaatttcaagaaaagagaccccggtcttcctgatttccaagttttcgtttacaataaaaatgacgatcttcagcattttcctacctataaagagctgcgatctatgttttcctcacttgattataaattcgaatttttaagcgaaatcgaggatgatgacgattgggagacaaactcctacgttgaagatatcccacgaaaggaatatattcataagaggagcgcgaaatctcaaactgaaaaaagtgagtcgtctatgaaagcaagttttcaaaaaaaaactgcacagtctagcacgaaaaagaagagaaaggcgtacccacctcacatacagcaaaatcgtagattgaagacgggatatcggagctttattatcgctattatggataatggccttatttcgtttgtaaaaatgtccgaggctgattttggatctgaaagtgtatggtatacacctaatactcaaaagaaagtagatcaaagatggaagaagcattaa

SEQ ID NO: 11272 - DNA, 1404 bp, Artificial Sequence
  Description of Artificial Sequence: Synthetic polynucleotide
atgcaattcgctgggaagaaaactgatcaagtgaccacatctaatccgggctttgaagaagaagaagaagaagaagaagaattacaacaagattggtctcaactcgcaagtctcgttagcaaaaatgctgctctttctcttccaaagaggggtgaaaaagactatgaaccagatgggactaatttgcaagatttacttctctataatgcaagtaaagccatgtttgataccatatctgacagtataagaggcacaacagtaaaatctgaagtaagaggatactatgttccccataaacatcaagccgttttacttaaacccaaaggcagctttatgcaaacgatgggaagggctgatagcacaggcgaactctggcttgacttccatgagtttgtttatttggcagagagaggcactattcttccttattatagattagaagcaggctctaacaaaagctctaagcacgaaacagagattttactcagtatggaggatttgtattctttattttcttctcaacaggaaatggaccaatattttgtgtttgctcatttaaaaaggttgggttttattttgaaacccagcaatcaagaagcagcagtcaagacttcctttttcccattgaaaaagcaaagaagtaatttacaagcaatcacttggagattactttctttgtttaaaatacaagagttatctttatttagtggtttcttctattctaagtggaattttttttttcgtaaatatacgacttctccacagttataccagggtttaaataggcttgttcgttccgtggctgtaccaaagaataaaaaagagttattggatgcacaatctgatagggaatttcaaaaggtaaaggatattcccttgacatttaaagtatggaaaccccattctaatttcaagaaaagagaccccggtcttcctgatttccaagttttcgtttacaataaaaatgacgatcttcagcattttcctacctataaagagttaagatctatgttttcctctcttgattataaattcgaatttttaagcgaaatcgaggatgatgacgattgggagacaaactcctacgttgaagatatcccaagaaaggaatatattcataagaggagcgcgaaatctcaaactgaaaaaagtgagtcttctatgaaagcaagttttcaaaaaaaaactgcacagtctagcacgaaaaagaagagaaaggcgtacccacctcacatacagcaaaatcgtagattgaagacgggatatagaagctttattatcgctattatggataatggccttatttcctttgtaaaaatgtccgaggctgattttggatctgaaagtgtatggtatacacctaatactcaaaagaaagtagatcaaagatggaagaagcattga

SEQ ID NO: 11273 - DNA, 5604 bp, Saccharomyces cerevisiae
atgacgtcacgagtttcgaggctggaccggcaggtaatattaatagagaccggttccacccaagtagtccggaacatggctgccgatcaaatgggagacttggccaaacagcaccccgaagacattctttcgttgctgtccagagtttacccctttttactagtgaagaaatgggaaacgcgtgttactgcagcaagagctgtgggtggcatagttgcccatgctccttcttgggatccgaatgaatctgacttggtaggtggtacaaatgaaggttctccattggataatgctcaggtgaagttggaacatgaaatgaaaataaaattggaagaggctactcagaacaatcagttgaatctcttacaggaggaccatcacctcagttctctgtctgattggaaattgaacgaaattttaaagtcaggtaaagtgctcctggcgtcgagtatgaatgattacaatgttcttggtaaggctgacgataatataagaaaacaagctaaaactgatgatataaaacaggaaacatctatgctaaatgcgtctgataaggcgaatgaaaataaaagtaatgctaacaagaagtcagcaaggatgcttgctatggcaaggcgaaaaaagaaaatgagtgctaagaatactcccaaacatcctgtagatataacggaaagttcagtttccaagactttattaaatggaaaaaatatgaccaattctgctgcatcgctagccacttctcccaccagtaaccagctaaatcccaaactggagattactgaacaagccgatgaaagtaaactaatgatagaatccacagtaaggccattgctagaacaacacgaaattgttgctggcctagtttggcaattccaaggcatttatgaactacttttagataatctaatgagcgaaaattgggaaataaggcatggagctgcgttgggtcttcgagaattggtaaaaaaacatgcttatggagtcagcagggttaaggggaatacccgagaggagaacaacctgaggaattctagaagcttagaagacttggcgtcccgtctacttacagtatttgcattggatagatttggtgattatgtttatgatacagttgtggcccctgtacgagagtcagttgcgcaaactctagctgcgttattaattcacctagacagtaccttatcaattaaaatatttaattgtttagaacaactggttctacaagatccactacaaacaggtctaccgaacaaaatatgggaagctacccatggagggcttttagggattcgttacttcgtcagcataaagacaaatttcctatttgcccatggccttttagaaaacgttgtccgtatagtgctatatggtttaaaccaaagtgatgatgacgttcaaagcgtagcagcctcaattttaaccccaataaccagcgaatttgtcaaattaaacaactctaccatagaaattttggtgaccacgatatggtcattactagctcgtttagatgatgatatatcttcaagcgtaggttctataatggatctattggcaaagttgtgcgaccaccaagaagtactagatattttaaagaacaaggctttagagcatccttcagagtggtcattcaagtcactggtaccgaaattgtatccctttttacgccattcgatttcttctgtgaggagggctgttttgaatctactgattgcattcttatcaataaaggatgattctactaaaaactggttaaacggcaaggtattccgtctagtttttcagaatattttactggagcaaaacccggaactattgcaactgtcttttgatgtttatgttgcgttattggagcattataaagttaagcataccgaaaaaactttagatcatgttttcagtaaacatttgcagccaatactacatcttctaaatacgccagtaggggaaaagggaaagaattatgccatggaatcacaatatattctaaagccttcccagcactatcaattacatccagaaaaaaaacgttctatatctgaaaccacaacagattctgacattccaataccaaaaaataatgaacatatcaatatcgatgcacctatgattgctggagatattactttgctaggattggacgtaatattgaacactagaataatgggagcaaaggcatttgctttgacattgtcaatgtttcaagattccacgcttcaatccttcttcacaaacgttctggttcgttgtttagagctgccattctcaactccacgtatgttggcaggcattattgtttcacagttttgctcctcgtggttacaaaagcatccagaaggggaaaaattaccttcttttgtatcagagattttcagtcctgtgatgaataaacagttactgaatcgcgatgaatttcctgtatttagggagctagtacctagcttaaaagctctgaggactcaatgtcaaagcctactggctacctttgtggatgtaggtatgttacctcagtacaaactacccaacgtagcaattgtggttcaaggcgaaacagaagccggtccacatgcgtttggtgttgaaacagcagaaaaagtgtacggcgaatactatgataaaatgttcaaatccatgaacaactcttacaaactattggccaagaagccattagaagattctaagcatcgcgtgttgatggcaatcaattcagccaaagaatccgcaaaacttcgtacaggcagcattctcgctaattacgcatcatccatcttgttatttgatggtctacctcttaaattaaaccccattatcaggtcgctaatggacagtgttaaagaagaaaggaatgaaaagttacaaacgatggccggagaatcggtcgtacatttgattcagcaactgttagaaaataataaagttaatgtgtctggtaagatagtcaaaaatctctgcggatttttatgcgttgatacttcagaagttcctgatttctccgtaaatgcagaatataaagaaaaaatattgacgttaataaaagaatctaattcgattgccgcacaagatgacattaatctcgcaaagatgtcggaagaggctcaactaaaaaggaagggtgggttgattacgttaaaaatactatttgaagttcttgggccttctatattacagaaactacctcagcttagatcgattttatttgattcattatctgatcatgaaaatgaggaagcaagtaaagttgacaacgagcaaggtcaaaaaatagtcgactcatttggtgtactaagagctctattcccatttatgtctgattcgctacgttctagtgaggtttttacccgtttccctgttttattaacgttcttaagatcaaacttatctgtttttcgttattcagctgcaagaacttttgctgatctggctaaaatttcctccgtggaggtaatggcttacaccatacgtgagattttgcctttaatgaatagcgctggttctctatccgatcgtcaagggtccacggagcttatttatcatttatcactttctatggaaaccgatgttctaccttacgtcattttcttaatagttccacttttgggtcgcatgagtgattcgaacgaagatgtgaggaatttagctacaacaacatttgcttctatcatcaaattagttcctttagaagctggtatcgccgatccaaaaggactcccagaagaactagtggcaagcagagagagggagcgtgattttatccaacaaatgatggatccttctaaagctaagccatttaaattacccattgccatcaaggcgactttaagaaaatatcagcaagatggtgttaactggttggcattcctgaacaaatatcatctacatggaatattgtgtgacgatatgggtttgggtaaaacattacaaaccatctgcattatcgcaagcgatcaatatttgaggaaggaagattatgaaaaaacgcgttctgttgaaagtagagccttaccatctctcataatatgccccccatctttaactggccattgggaaaacgagtttgaccagtatgctccctttttaaaggttgttgtgtatgccggtggcccaactgtcagattaactctgagaccacagttaagtgatgctgatattattgtaacatcatatgacgtagctagaaatgatctcgcagtcctaaacaaaactgaatataattattgtgttttggatgaaggacatataattaaaaactctcaatcaaaacttgctaaggctgttaaagaaattactgcaaaccatagattaattttaaccggaactcccatccaaaacaacgttttagaattgtggtctctgtttgacttcttaatgccgggatttttgggaacggaaaagatgttccaggaaaggttcgcaaagccaatcgctgcgtcaagaaatagtaaaacatcatctaaggagcaggaagcaggtgtactggctttggaggcactacataagcaagttctacctttcatgctgagaagattgaaggaagacgttctatctgatttaccacctaaaattattcaggattactactgtgaattaggtgatttacaaaaacaactatacatggattttactaaaaaacaaaaaaatgtagttgagaaagatattgaaaattctgagattgctgatggcaagcaacatattttccaagctttacaatacatgagaaaattgtgtaatcatccagctttggtcctttcaccaaatcacccgcaattagcgcaagtacaagactatttaaagcaaactggtctagatttacacgatattatcaacgctccaaaactgagcgcattgagaacattactctttgaatgtggtataggtgaagaagatatcgacaaaaaagcaagccaagatcagaattttcctattcaaaatgtcatatcacaacacagagccctgattttctgccaactaaaagatatgctagacatggttgaaaatgacttgtttaaaaagtatatgccctccgtaacctatatgaggctagatggaagcattgacccaagagacagacaaaaagttgttcggaaatttaacgaagatccctctattgattgcctactgttgaccaccaaggtcggagggctgggtctgaatttaactggtgcagacaccgtcatttttgtagagcatgactggaatccaatgaatgatctacaggcaatggacagagcacatagaattggtcagaaaaaggttgttaatgtttacagaattattacgaaaggtacgcttgaagaaaaaatcatgggtttgcagaaattcaaaatgaatatagcttctacagttgttaatcagcaaaacagtggattagcatccatggatacacatcagctgcttgatctcttcgaccccgataacgttacctcacaggacaatgaggaaaagaataatggcgattcccaagcagccaagggcatggaagatattgccaacgagactggtttaactggcaaagccaaagaggccctcggtgaattgaaagagctatgggacccatctcaatacgaggaggagtataatttagacaccttcatcaaaactttacgataa

SEQ ID NO: 11274 - DNA, 5604 bp, Artificial Sequence
  Description of Artificial Sequence: Synthetic polynucleotide
atgacgtctagagtttccaggttggacagacaggtaatattaatagagaccggttccacccaagtagtcagaaacatggctgccgatcaaatgggagacttggccaaacagcaccccgaagacattctttctttgttatccagagtttacccctttttattggtgaagaaatgggaaacgcgtgttactgcagcaagagctgtgggtggcatagttgcccatgctccttcttgggatccgaatgaatctgacttggtaggtggtacaaatgaaggttctccattggataatgctcaggtgaagttggaacatgaaatgaaaataaaattggaagaggctactcagaacaatcagttgaatctcttacaggaggaccatcacctcagttctttatctgattggaaattgaacgaaattttaaagtctggtaaagtgctccttgcgtccagtatgaatgattacaatgttcttggtaaggctgacgataatataagaaaacaagctaaaactgatgatataaaacaggaaacatctatgttgaatgcgtctgataaggcgaatgaaaataaaagtaatgctaacaagaagtctgcaaggatgcttgctatggcaaggagaaaaaagaaaatgagtgctaagaatactcccaaacatcctgtagatataacggaaagttctgtttccaagactttattaaatggaaaaaatatgaccaattctgctgcatctttggccacttctcccaccagtaaccagttgaatcccaaattagagattactgaacaagccgatgaaagtaaattaatgatagaatccacagtaaggccattgttggaacaacacgaaattgttgctggccttgtttggcaattccaaggcatttatgaattgcttttagataatttaatgagcgaaaattgggaaataaggcatggagctgcgttgggtcttagagaattggtaaaaaaacatgcttatggagtcagcagggttaaggggaataccagagaggagaacaacttgaggaattctagaagcttagaagacttggcgtcccgtttacttacagtatttgcattggatagatttggtgattatgtttatgatacagttgtggcccctgtaagagagtctgttgcgcaaactttggctgcgttattaattcacttagacagtaccttatccattaaaatatttaattgtttagaacaattggttttgcaagatccattgcaaacaggtttaccgaacaaaatatgggaagctacccatggagggcttttagggattcgttacttcgtcagcataaagacaaatttcttatttgcccatggccttttagaaaacgttgtccgtatagtgctttatggtttaaaccaaagtgatgatgacgttcaaagcgtagcagcctctattttaaccccaataaccagcgaatttgtcaaattaaacaactctaccatagaaattttggtgaccacgatatggtctttattagctcgtttagatgatgatatatcttctagcgtaggttctataatggatttattggcaaagttgtgcgaccaccaagaagtattggatattttaaagaacaaggctttagagcatccttctgagtggagtttcaagtctttagtaccgaaattgtatccctttttacgccattctatttcttctgtgaggagggctgttttgaatttattgattgcattcttatctataaaggatgattctactaaaaactggttaaacggcaaggtattccgtttagtttttcagaatattttattggagcaaaacccggaattattgcaattatcttttgatgtttatgttgcgttattggagcattataaagttaagcataccgaaaaaactttagatcatgttttcagtaaacatttgcagccaatattacatcttttgaatacgccagtaggggaaaagggaaagaattatgccatggaatctcaatatattttgaagccttcccagcactatcaattacatccagaaaaaaaacgttctatatctgaaaccacaacagattctgacattccaataccaaaaaataatgaacatatcaatatcgatgcacctatgattgctggagatattactttgttgggattggacgtaatattgaacactagaataatgggagcaaaggcatttgctttgacattgtccatgtttcaagattccacgcttcaatccttcttcacaaacgttttggttcgttgtttagagttaccattctctactccacgtatgttggcaggcattattgtttctcagttttgctcctcttggttacaaaagcatccagaaggggaaaaattaccttcttttgtatctgagattttcagtcctgtgatgaataaacagttattgaatcgcgatgaatttcctgtatttagggagttggtacctagcttaaaagctttgaggactcaatgtcaaagcttattagctacctttgtggatgtaggtatgttacctcagtacaaattgcccaacgtagcaattgtggttcaaggcgaaacagaagccggtccacatgcgtttggtgttgaaacagcagaaaaagtgtacggcgaatactatgataaaatgttcaaatccatgaacaactcttacaaacttttggccaagaagccattagaagattctaagcatcgcgtgttgatggcaatcaattctgccaaagaatccgcaaaacttcgtacaggcagcattctcgctaattacgcatcttccatcttgttatttgatggtttgcctcttaaattaaaccccattatcaggtccttgatggacagtgttaaagaagaaaggaatgaaaagttacaaacgatggccggagaatctgtcgtacatttgattcagcaattattagaaaataataaagttaatgtgtctggtaagatagtcaaaaatctctgcggatttttatgcgttgatacttctgaagttcctgatttctccgtaaatgcagaatataaagaaaaaatattgacgttaataaaagaatctaattctattgccgcacaagatgacattaatctcgcaaagatgtctgaagaggctcaattgaaaaggaagggtgggttgattacgttaaaaatattgtttgaagttcttgggccttctatattacagaaattacctcagcttagatctattttatttgattctttatctgatcatgaaaatgaggaagcaagtaaagttgacaacgagcaaggtcaaaaaatagtcgactcttttggtgtattaagagctttattcccatttatgtctgattctttacgttctagtgaggtttttacccgtttccctgttttattaacgttcttaagatctaacttatctgtttttcgttattctgctgcaagaacttttgctgatttggctaaaatttcctccgtggaggtaatggcttacaccatacgtgagattttgcctttaatgaatagcgctggttctttatccgatcgtcaagggtccacggagcttatttatcatttatctctttctatggaaaccgatgttttaccttacgtcattttcttaatagttccacttttgggtcgcatgagtgattccaacgaagatgtgaggaatttagctacaacaacatttgcttctatcatcaaattagttcctttagaagctggtatcgccgatccaaaaggactcccagaagaattagtggcaagcagagagagggagcgtgattttatccaacaaatgatggatccttctaaagctaagccatttaaattacccattgccatcaaggcgactttaagaaaatatcagcaagatggtgttaactggttggcattcttgaacaaatatcatttgcatggaatattgtgtgacgatatgggtttgggtaaaacattacaaaccatctgcattatcgcaagcgatcaatatttgaggaaggaagattatgaaaaaacgcgttctgttgaaagtagagccttaccatctctcataatatgccccccatctttaactggccattgggaaaacgagtttgaccagtatgctccctttttaaaggttgttgtgtatgccggtggcccaactgtcagattaactttgagaccacagttaagtgatgctgatattattgtaacatcttatgacgtagctagaaatgatctcgcagtcttgaacaaaactgaatataattattgtgttttggatgaaggacatataattaaaaactctcaaagtaaacttgctaaggctgttaaagaaattactgcaaaccatagattaattttaaccggaactcccatccaaaacaacgttttagaattgtggtctttatttgacttcttaatgccgggatttttgggaacggaaaagatgttccaggaaaggttcgcaaagccaatcgctgcgtccagaaatagtaaaacatcttctaaggagcaggaagcaggtgtattggctttggaggcattgcataagcaagttttacctttcatgttgagaagattgaaggaagacgttttatctgatttaccacctaaaattattcaggattactactgtgaattaggtgatttacaaaaacaattgtacatggattttactaaaaaacaaaaaaatgtagttgagaaagatattgaaaattctgagattgctgatggcaagcaacatattttccaagctttacaatacatgagaaaattgtgtaatcatccagctttggtcctttctccaaatcacccgcaattagcgcaagtacaagactatttaaagcaaactggtttggatttacacgatattatcaacgctccaaaattaagcgcattgagaacattactctttgaatgtggtataggtgaagaagatatcgacaaaaaagcaagccaagatcagaattttcctattcaaaatgtcatatctcaacacagagccttaattttctgccaattgaaagatatgttggacatggttgaaaatgacttgtttaaaaagtatatgccctccgtaacctatatgaggttagatggaagcattgacccaagagacagacaaaaagttgttagaaaatttaacgaagatccctctattgattgcttattattgaccaccaaggtcggagggttaggtttgaatttaactggtgcagacaccgtcatttttgtagagcatgactggaatccaatgaatgatttacaggcaatggacagagcacatagaattggtcagaaaaaggttgttaatgtttacagaattattacgaaaggtacgcttgaagaaaaaatcatgggtttgcagaaattcaaaatgaatatagcttctacagttgttaatcagcaaaacagtggattagcatccatggatacacatcagttacttgatctcttcgaccccgataacgttacctctcaggacaatgaggaaaagaataatggcgattcccaagcagccaagggcatggaagatattgccaacgagactggtttaactggcaaagccaaagaggccctcggtgaattgaaagagttatgggacccatctcaatacgaggaggagtataatttagacaccttcatcaaaactttacgttga

SEQ ID NO: 11275 - DNA, 594 bp, Saccharomyces cerevisiae
atgccaagagccccaagaacatattccaagacttactctaccccaaagagaccttacgaatcttctcgtttggacgcagaattgaagttggccggtgaattcggtttgaagaacaagaaggaaatttacagaatttccttccagttatctaagattcgtcgtgctgcaagagacttgttgacaagagacgaaaaggacccaaagagattgttcgaaggtaatgctttgattaggagactagttagagtcggtgttttatccgaagataagaagaagttagattatgttttagccttgaaggtcgaagatttcttggaaagaagattgcaaactcaagtctacaagctaggtttagccaagtctgtccaccatgcaagagttttaatcactcaaaggcacattgctgttggtaagcaaattgtcaacatcccctctttcatggtcagattggactctgagaagcacattgactttgctccaacatctccattcggtggtgctagaccaggcagagttgctagaagaaatgctgcaaggaaggcggaagcttctggtgaagctgctgatgaagctgatgaggccgatgaagaataa

SEQ ID NO: 11276 - DNA, 594 bp, Artificial Sequence
  Description of Artificial Sequence: Synthetic polynucleotide
atgccaagagccccaagaacatattccaagacttactctaccccaaagagaccttacgaatcttctcgtttggacgcagaattgaagttggccggtgaattcggtttgaagaacaagaaggaaatttacagaatttccttccagttatctaagattcgtcgtgctgcaagagacttgttgacaagagacgaaaaggacccaaagagattgttcgaaggtaatgctttgattaggagattggttagagtcggtgttttatccgaagataagaagaagttagattatgttttagccttgaaggtcgaagatttcttggaaagaagattgcaaactcaagtctacaagttgggtttagccaagtctgtccaccatgcaagagttttaatcactcaaaggcacattgctgttggtaagcaaattgtcaacatcccctctttcatggtcagattggactctgagaagcacattgactttgctccaacatctccattcggtggtgctagaccaggcagagttgctagaagaaatgctgcaaggaaggcggaagcttctggtgaagctgctgatgaagctgatgaggccgatgaagaatga

SEQ ID NO: 11277 - DNA, 327 bp, Saccharomyces cerevisiae
atggatggatcttacctcactcaccgatattgcgcgctcaagcggccctatactgcacacctattacttcttgatttttcaaaggacgaagttacaaaaaatgtttggaggtggaaaggtacggatgttaaacttcataaaatgggtagaaaaagcatcgttgctgcagtgtacaatcaagctcacccgagccatccacctctctaccatctcggtaacttgaatggtgacaaatatgtcgcctcacctcctagtcgaatgaaggcagtcagcctatcttttgcgtttactttcttatattattattttccgcttcctactaattag

SEQ ID NO: 11278 - DNA, 327 bp, Artificial Sequence
  Description of Artificial Sequence: Synthetic polynucleotide
atggatggatcttacctcactcacagatattgcgcgctcaagagaccctatactgcacacttattacttcttgatttttccaaggacgaagttacaaaaaatgtttggaggtggaaaggtacggatgttaaacttcataaaatgggtagaaaaagcatcgttgctgcagtgtacaatcaagctcacccgagccatccacctctctaccatctcggtaacttgaatggtgacaaatatgtcgcctctcctcctagtagaatgaaggcagtcagcttgtcttttgcgtttactttcttatattattattttccgcttcctactaattga

SEQ ID NO: 11279 - DNA, 483 bp, Saccharomyces cerevisiae
atgggtaaatcacatggttacagatctcgtacacgttacatgttccaacgtgacttcagaaagcatggtgccgttcacatgtccacctacttgaagatctacaaggttggtgacattgtcgacatcaaagccaatggttctatccaaaagggtatgccacacaagttctaccaaggtaagaccggtgtcgtctacaacgttaccaagtcttctgttggtgttatcatcaacaagatggtcggtaacagatacttggaaaagagattgaacttgagagttgaacacatcaagcactctaaatgtagacaagaatttttggaaagagttaaggccaatgctgctaagcgtgctgaagccaaggcccaaggtgttgctgtccaattgaagagacaaccagctcaaccaagagaatcccgtattgtctctactgaaggtaacgttcctcaaactttagctccagttccatacgaaaccttcatttaa

SEQ ID NO: 11280 - DNA, 483 bp, Artificial Sequence
  Description of Artificial Sequence: Synthetic polynucleotide
atgggtaaatctcatggttacagatctcgtacacgttacatgttccaacgtgacttcagaaagcatggtgccgttcacatgtccacctacttgaagatctacaaggttggtgacattgtcgacatcaaagccaatggttctatccaaaagggtatgccacacaagttctaccaaggtaagaccggtgtcgtctacaacgttaccaagtcttctgttggtgttatcatcaacaagatggtcggtaacagatacttggaaaagagattgaacttgagagttgaacacatcaagcactctaaatgtagacaagaatttttggaaagagttaaggccaatgctgctaagcgtgctgaagccaaggcccaaggtgttgctgtccaattgaagagacaaccagctcaaccaagagaatcccgtattgtctctactgaaggtaacgttcctcaaactttagctccagttccatacgaaaccttcatttga

SEQ ID NO: 11281 - DNA, 735 bp, Saccharomyces cerevisiae
atgagcatgagtatgggtgtccgtggcctagcgttaaggtccgtttctaaaacattatttagccaaggtgttcgttgtccttcgatggtgattggagcccgttatatgtcttccactccagaaaaacagacagatccaaaagcaaaggctaactctatcatcaatgccattccaggtaataatattttgacaaagacgggggttttggggacttctgctgccgctgtcatttatgccatttccaatgaattgtacgttatcaacgatgaaagtattttattgctgacttttttgggtttcactggtttagtggcaaagtatttggcgccagcatataaagattttgccgatgcaagaatgaagaaagtctccgacgttttaaatgcctcgagaaacaagcatgtcgaagctgttaaagatagaatcgactctgtctctcaactacaaaatgttgctgaaactacaaaggttttgtttgatgtttccaaggaaactgttgaacttgaaagcgaagcctttgaattgaaacaaaaggtagaattagctcacgaagcaaaggcagtcttagattcgtgggttagatatgaagcttccttgcgtcaattggaacaaaggcaactagcaaaatctgtcatctccagagttcagtcagaattgggtaatccaaaattccaagagaaagttttgcaacagtctatatctgaaattgaacaattgctttctaaattgaagtaa

SEQ ID NO: 11282 - DNA, 735 bp, Artificial Sequence
  Description of Artificial Sequence: Synthetic polynucleotide
atgagcatgagtatgggtgtccgtggcttggcgttaaggtccgtttctaaaacattatttagccaaggtgttcgttgtccttctatggtgattggagcccgttatatgtcttccactccagaaaaacagacagatccaaaagcaaaggctaactctatcatcaatgccattccaggtaataatattttgacaaagacgggggttttggggacttctgctgccgctgtcatttatgccatttccaatgaattgtacgttatcaacgatgaaagtattttattgttgacttttttgggtttcactggtttagtggcaaagtatttggcgccagcatataaagattttgccgatgcaagaatgaagaaagtctccgacgttttaaatgcctctagaaacaagcatgtcgaagctgttaaagatagaatcgactctgtctctcaattacaaaatgttgctgaaactacaaaggttttgtttgatgtttccaaggaaactgttgaacttgaaagcgaagcctttgaattgaaacaaaaggtagaattagctcacgaagcaaaggcagtcttagattcttgggttagatatgaagcttccttgcgtcaattggaacaaaggcaattggcaaaatctgtcatctccagagttcagtctgaattgggtaatccaaaattccaagagaaagttttgcaacagtctatatctgaaattgaacaattgctttctaaattgaagtga

SEQ ID NO: 11283 - DNA, 723 bp, Saccharomyces cerevisiae
atgaaagatctccagaaaaaaagctcagtacgaaggcaaatcacgaatgaagacgatgaacggtatggggaggacagcatccatgaccttcccaggacaataccaaatgtaaatccctatattagaaattcaggatttaggccatcttattcttcccaaattccttcgacaaggagtctattcaataactattataaccgttcaagtgctaacacagttggtaatgacacaatagataccgatagtgttagctataacggagttgccaaattccggagaaatagcgtagatataccgctacagacacataacagactggaagtacggcctataatcgacagacaagactatttgtggagagaaatagatgccctagatgacgttaaaagacaggcgcaggcaacagaattgtatgatcagtttcctccagggttcgagaacaaactgatgcaattaaggcaagcacatagtaaactacttcaagtcttgagggaccgcaatgctaaaatagaagaggaacaacgtcgtgaagtggcggtcgcaaccgctgctgccatgatgactagaacgccatcaccaacaggaaaatccgtcggagatgaagctacaagcaacaacatgcatagtagcagcgcaattagaaatccaaatggaccaaccgttgatcctgaagaaggaaagtacattcaagagctggtgaacactataagggaattacaatag

SEQ ID NO: 11284 - DNA, 723 bp, Artificial Sequence
  Description of Artificial Sequence: Synthetic polynucleotide
atgaaagatctccagaaaaaaagctctgtaagaaggcaaatcacgaatgaagacgatgaaagatatggggaggacagcatccatgaccttcccaggacaataccaaatgtaaatccctatattagaaattctggatttaggccatcttattcttcccaaattccttctacaaggagtttattcaataactattataaccgttctagtgctaacacagttggtaatgacacaatagataccgatagtgttagctataacggagttgccaaattcagaagaaatagcgtagatataccgttgcagacacataacagattagaagtaagacctataatcgacagacaagactatttgtggagagaaatagatgccttggatgacgttaaaagacaggcgcaggcaacagaattgtatgatcagtttcctccagggttcgagaacaaattaatgcaattaaggcaagcacatagtaaattacttcaagtcttgagggaccgcaatgctaaaatagaagaggaacaacgtcgtgaagtggcggtcgcaaccgctgctgccatgatgactagaacgccatctccaacaggaaaatccgtcggagatgaagctacaagcaacaacatgcatagtagcagcgcaattagaaatccaaatggaccaaccgttgatcctgaagaaggaaagtacattcaagagttggtgaacactataagggaattacaatga

SEQ ID NO: 11285 - DNA, 843 bp, Saccharomyces cerevisiae
atgacaagatctccctggaagcgcctactatggttgaaacaggagtacccagataattatacagatccaagttttattgagttgagagcaagacaaaaggctgagagtaaccagaagtctgatagaaaattatcagaagctgctcgcgctcaaattaggttggattttataagtttctaccaaaccatattgaacacttctttcatttacatcacttttacatatatttactattatggcttcgatcctattccgccaactattttcctttcatttataacattgattatatcaaggacgaaagtcgaccctctattgtcctcattcatggacgtaaagtcttcgctgattatcacatttgcaatgttgactctctctccagtcctcaaatctctttctaaaacaactgcatctgattccatatggacattgtctttttggctgaccctatggtacattttcgttatttcgtcaacaaagtccaaagataaaccctctaacctttccaccaatatacttgtcgcccttgttgctgtcctatcatcgaggctttcgaccacaatcgacgtattctgttttcttttaatttgtattcagttgaatatcattctacccacttatttatcggtgacgaataaggtagtaccaataatttcaaatattattgtatactcatttttgaatgttgctctaggttggatttatatgctgttgattttctttgcttcagtattttatattactgttttacctaagtggttcatctactggaaaatcaattatcataaacgggataacgatctactaagtacatgggatgcaagaacaccaatattggattag

SEQ ID NO: 11286 - DNA, 843 bp, Artificial Sequence
  Description of Artificial Sequence: Synthetic polynucleotide
atgacaagatctccctggaagcgccttttatggttgaaacaggagtacccagataattatacagatccaagttttattgagttgagagcaagacaaaaggctgagagtaaccagaagtctgatagaaaattatctgaagctgctcgcgctcaaattaggttggattttataagtttctaccaaaccatattgaacacttctttcatttacatcacttttacatatatttactattatggcttcgatcctattccgccaactattttcctttcttttataacattgattatatctaggacgaaagtcgaccctttattgtccagtttcatggacgtaaagtcttctttgattatcacatttgcaatgttgactctctctccagtcctcaaatctctttctaaaacaactgcatctgattccatatggacattgtctttttggttgaccttatggtacattttcgttatttcttctacaaagtccaaagataaaccctctaacctttccaccaatatacttgtcgcccttgttgctgtcctttcttccaggctttctaccacaatcgacgtattctgttttcttttaatttgtattcagttgaatatcattttgcccacttatttatctgtgacgaataaggtagtaccaataatttctaatattattgtatactcttttttgaatgttgctttgggttggatttatatgcttttgattttctttgcttctgtattttatattactgttttacctaagtggttcatctactggaaaatcaattatcataaaagagataacgatttattaagtacatgggatgcaagaacaccaatattggattga

SEQ ID NO: 11287 - DNA, 2358 bp, Saccharomyces cerevisiae
atggtatgtaccagcacgagctcaaacttttattccattgcacaatatattttacaatcatacttcaaggtcaatgtagattctctaaactctctgaaattggtggatttgatagtggaccaaacttaccctgattctttgacgctgcgaaagctgaatgaaggagcaacgggacaaccatacgattatttcaatacagtttctcgtgatgctgatatctccaagtgtccaatttttgcgttgaccatattttttgttatacgatggagccacccaaaccctccaatttcaattgagaattttactacagtaccgttgctagattcaaactttatttctctaaattccaatcctttactatatattcaaaatcaaaacccaaacagcaattcaagtgttaaagtttcaaggtcacaaacgtttgaaccttctaaagagttgatcgatttggtatttccatggctgtcttatttgaagcaggatatgcttcttattgataggacgaattacaagctttattctctctgtgaactatttgaatttatgggcagggttgccattcaggatctccgatatctgagtcaacatcccttattactacccaatatcgtaacattcatttcaaaatttattcctgagttattccaaaacgaagagtttaaaggaatcggttcaattaaaaattcaaacaataatgccctgaacaatgttacaggaatagaaacccaatttttaaatccatctaccgaggaagtgagtcaaaaagttgattcttactttatggaattatcaaaaaaattaactacagaaaatatcaggttaagtcaagaaataacacaactaaaagcagatatgaactccgtaggcaatgtttgtaaccaaattttgctgttgcagagacaattgctttcaggaaatcaggcgatcggatcaaagtccgaaaatattgtgtcttccacaggtggggggatattaatactagataaaaatagcatcaattcgaacgtactgagtaatttggttcagtcgatagatcctaatcactccaagcccaacggacaagcccaaacacatcaaaggggtccgaaaggacaatcacatgcacaggttcaaagtactaatagccctgcgctagcgccaattaacatgttcccgagcttaagtaattctatacagccgatgcttggcaccttggctccgcaaccgcaagatatagtacagaagaggaagctaccgttaccaggttcaatagcctctgcagcaacaggcagtcctttttctccatcacccgttggtgagtctccctatagcaaacgctttaaactagacgataaaccaactccgtctcagacggctcttgattccttacttacaaaatccatttcaagccctagattacccctttcgacgttggctaacacagctgtcacggaatcttttcgctcacctcagcagtttcagcattctccagattttgtagttggtggtagctcaagttcaacaacggaaaataactctaagaaggtaaatgaagattctccatcatcttcttcaaaactagctgaacgacctcgtcttccaaacaacgactccactactagcatgcctgaaagtcccaccgaggtagctggtgatgatgttgatagggagaaaccgccagagtcaagtaagtcggagcccaatgataacagcccagaatcgaaagatcctgagaaaaatggtaaaaacagtaatccgcttggtacggatgctgacaaaccagtaccaatttctaatattcataattctactgaggctgcaaattcaagtggtacagtgacaaagacagctccatcatttccgcagagttcttctaagtttgaaattataaataaaaaggatacgaaggcggggccaaacgaggcaatcaaatacaagctgtccagagaaaataaaacaatatgggacctatatgcggagtggtatattggtctgaacggtaaatcttcaataaaaaaattgattgaaaattatggctggcgaaggtggaaggttagcgaagattcacatttttttcctactagaagaattattatggattatattgaaacggaatgtgatcgtggcataaaactcggcaggtttactaatcctcaacaaccgagggaggatatacggaagattttagtaggggacctagaaaagttcaggataaataacggtctgactctgaattctctatcattgtactttagaaatttaacgaaaaataacaaggaaatttgtatttttgaaaactttaaaaattggaacgttagatcaatgacagaagaagagaaattaaagtattgcaaaaggcgacataatacaccatcttaa

SEQ ID NO: 11288 - DNA, 2358 bp, Artificial Sequence
  Description of Artificial Sequence: Synthetic polynucleotide
atggtatgtaccagcacgagcagtaacttttattccattgcacaatatattttacaatcttacttcaaggtcaatgtagattctttgaactctttgaaattggtggatttgatagtggaccaaacttaccctgattctttgacgcttagaaagttgaatgaaggagcaacgggacaaccatacgattatttcaatacagtttctcgtgatgctgatatctccaagtgtccaatttttgcgttgaccatattttttgttataagatggagccacccaaaccctccaatttccattgagaattttactacagtaccgttgttggattccaactttatttctttgaattccaatcctttattatatattcaaaatcaaaacccaaacagcaatagtagtgttaaagtttccaggtctcaaacgtttgaaccttctaaagagttgatcgatttggtatttccatggttatcttatttgaagcaggatatgcttcttattgataggacgaattacaagctttattctctctgtgaattatttgaatttatgggcagggttgccattcaggatctcagatatttgagtcaacatcccttattattgcccaatatcgtaacattcatttccaaatttattcctgagttattccaaaacgaagagtttaaaggaatcggttccattaaaaatagcaacaataatgccttgaacaatgttacaggaatagaaacccaatttttaaatccatctaccgaggaagtgagtcaaaaagttgattcttactttatggaattatccaaaaaattaactacagaaaatatcaggttaagtcaagaaataacacaattgaaagcagatatgaactccgtaggcaatgtttgtaaccaaattttgttgttgcagagacaattgctttctggaaatcaggcgatcggatccaagtccgaaaatattgtgtcttccacaggtggggggatattaatattggataaaaatagcatcaatagcaacgtattgagtaatttggttcagagtatagatcctaatcactccaagcccaacggacaagcccaaacacatcaaaggggtccgaaaggacaatctcatgcacaggttcaaagtactaatagccctgcgttagcgccaattaacatgttcccgagcttaagtaattctatacagccgatgcttggcaccttggctccgcaaccgcaagatatagtacagaagaggaagttaccgttaccaggttccatagcctctgcagcaacaggcagtcctttttctccatctcccgttggtgagtctccctatagcaaacgctttaaattagacgataaaccaactccgtctcagacggctcttgattccttacttacaaaatccatttctagccctagattacccctttctacgttggctaacacagctgtcacggaatcttttcgcagtcctcagcagtttcagcattctccagattttgtagttggtggtagcagtagttctacaacggaaaataactctaagaaggtaaatgaagattctccatcttcttcttctaaattggctgaaaggcctcgtcttccaaacaacgactccactactagcatgcctgaaagtcccaccgaggtagctggtgatgatgttgatagggagaaaccgccagagagcagtaagagtgagcccaatgataacagcccagaaagtaaagatcctgagaaaaatggtaaaaacagtaatccgcttggtacggatgctgacaaaccagtaccaatttctaatattcataattctactgaggctgcaaatagtagtggtacagtgacaaagacagctccatcttttccgcagagttcttctaagtttgaaattataaataaaaaggatacgaaggcggggccaaacgaggcaatcaaatacaagttatccagagaaaataaaacaatatgggacctttatgcggagtggtatattggtttgaacggtaaatcttctataaaaaaattgattgaaaattatggctggagaaggtggaaggttagcgaagattctcatttttttcctactagaagaattattatggattatattgaaacggaatgtgatcgtggcataaaactcggcaggtttactaatcctcaacaaccgagggaggatataagaaagattttagtaggggacttggaaaagttcaggataaataacggtttgactttgaattctttatctttgtactttagaaatttaacgaaaaataacaaggaaatttgtatttttgaaaactttaaaaattggaacgttagaagtatgacagaagaagagaaattaaagtattgcaaaaggagacataatacaccatcttga

SEQ ID NO: 11289 - DNA, 2265 bp, Saccharomyces cerevisiae
atggcacatgaaaagtttagtatacctgagaacttcacattagcgcagtctttgcaattgctttactctgttgtcaaaaatcaatataaaaacctagcagacctaataatcaatagcaaaggtaataaggacacagtaacgtatgggaaaatccacaaaaacttagacactttactggtatacgtcaatgaaggtctacgaaaaattgaaaagacttataccttaaagaaagggttaggaaatcttgtagttgatcatcctgaattgaggagcatcattgaggatttccaaattcttggccaggatataaggatcgcacgtcgtaaagcagaaacgcttatggccgaaggaaacggtagtccctctttgtcatcctcctcttccgttttgggccttgggacaggaaatggtttgcgttttccaaaactttggagaatgggttccaaaagagataaattgaaagaagctgacgaaaaggaggctaaaatcaacaaacaggctgataatatcagacgtgctaggaaattagaagaagagaaaaagttaggagcaaaacttcagtatgagagggacttagaacttcaaagggaaaaattgatcgagttaaaggttaaagaaaaggtcgaatttgaagtggcccaaaagttggaggaggagagagttaagagagaggaagaagaacgcaaacatagagaacaagcggagaaaaaacgtatatcaaccctgaaacatgagaggaaaacaaattacaaatcaagggctagcctcgacaacttctcttccagtagcaaatcttctggaaagattgacaactccctaattaaaagaagatcacttgacgttgtacggacttcaggcgaaagagtacgaacgccagtaagaaaatcaatggaggcagcagaaataggtatggctgcgcagttagcctggtctcagtatcaaaacggggcaaatcattcaaaagtgagtaacaacggatcgcattcaaatgaacttcagatacgttataagccaacaccacctttgaaaaaaaggtatgactacaaaaagccaacagttaatcgaccgattataaaatcacctactcttaacaggcaaaacagcaagtcttcacggaatatacccacaaatagcaagctgaaggctagtaaatccaatactaacaaagtttctcgtaggaatgagcaaaatttggagcctagttcaccagtactcgtttcagcgacagcggtacctgctgaatccaaacccatgcgttctaaaagtggtacacccgataaggaaagctctgctagttcatccctcgattccagaaaggaggatatattaaaatcagtgcagggagtagatcgaaacgcttgtgaacagatacttaatgaaattcttgttacggatgaaaaagtttattgggaggatatcgcaggcttacggaatgcgaagaattctttgaaagaagcagtggtttacccatttctgcggcctgacttattcaaagggctaagagaacctgttagaggtatgcttttgttcggcccaccaggtacaggtaagacaatgattgctaaggcggttgcgacagagtccaattccacattttttagtgtaagtgcatcttctttgctatcgaaatacctcggtgaatctgagaagctggttagagcattgttttacatggccaaaaaattgtcaccctcaattattttcatagatgagattgactctatgttaacagctcgctctgataatgaaaatgagtcctcgaggagaattaaaacagaacttcttattcagtggtcctccctatctagtgctactgcacaatcggaagaccgaaataatacgcttgacagcagagtacttgtcttaggagcaacgaatttgccatgggcgattgatgatgcagcaagaagacgattttcacggaaactatacattcctttaccagattatgaaactagactatatcatttgaagagattaatggccaagcagaaaaatagcctgcaagatttagactatgaattaataacagaaatgaccgaggggttttctggttctgatcttacgtcattagccaaagaagcggcaatggaacctattagagatttaggagataagttgatgtttgcggattttgataaaatcagaggaattgaaataaaagattttcagaatgctctgttgacaataaaaaagagcgtgtcgtcagaatctctacaaaaatatgaggagtggtctagtaaattcggtagtaatggttcctga

SEQ ID NO: 11290 - DNA, 2265 bp, Artificial Sequence
  Description of Artificial Sequence: Synthetic polynucleotide
atggcacatgaaaagtttagtatacctgagaacttcacattagcgcagtctttgcaattgctttactctgttgtcaaaaatcaatataaaaacttggcagacttgataatcaatagcaaaggtaataaggacacagtaacgtatgggaaaatccacaaaaacttagacactttattggtatacgtcaatgaaggtttaagaaaaattgaaaagacttataccttaaagaaagggttaggaaatcttgtagttgatcatcctgaattgaggagcatcattgaggatttccaaattcttggccaggatataaggatcgcacgtcgtaaagcagaaacgcttatggccgaaggaaacggtagtccctctttgtcttcctcctcttccgttttgggccttgggacaggaaatggtttgcgttttccaaaactttggagaatgggttccaaaagagataaattgaaagaagctgacgaaaaggaggctaaaatcaacaaacaggctgataatatcagacgtgctaggaaattagaagaagagaaaaagttaggagcaaaacttcagtatgagagggacttagaacttcaaagggaaaaattgatcgagttaaaggttaaagaaaaggtcgaatttgaagtggcccaaaagttggaggaggagagagttaagagagaggaagaagaacgcaaacatagagaacaagcggagaaaaaacgtatatctaccttgaaacatgagaggaaaacaaattacaaatctagggctagcctcgacaacttctcttccagtagcaaatcttctggaaagattgacaactccttgattaaaagaagatctcttgacgttgtaagaacttctggcgaaagagtaagaacgccagtaagaaaatctatggaggcagcagaaataggtatggctgcgcagttagcctggtctcagtatcaaaacggggcaaatcattctaaagtgagtaacaacggatctcattctaatgaacttcagatacgttataagccaacaccacctttgaaaaaaaggtatgactacaaaaagccaacagttaatagaccgattataaaatctcctactcttaacaggcaaaacagcaagtcttccagaaatatacccacaaatagcaagttgaaggctagtaaatccaatactaacaaagtttctcgtaggaatgagcaaaatttggagcctagttctccagtactcgtttctgcgacagcggtacctgctgaatccaaacccatgcgttctaaaagtggtacacccgataaggaaagctctgctagttcttccctcgattccagaaaggaggatatattaaaatctgtgcagggagtagatagaaacgcttgtgaacagatacttaatgaaattcttgttacggatgaaaaagtttattgggaggatatcgcaggcttaagaaatgcgaagaattctttgaaagaagcagtggtttacccatttttaagacctgacttattcaaagggttgagagaacctgttagaggtatgcttttgttcggcccaccaggtacaggtaagacaatgattgctaaggcggttgcgacagagtccaattccacattttttagtgtaagtgcatcttctttgctttctaaatacctcggtgaatctgagaagttggttagagcattgttttacatggccaaaaaattgagcccctctattattttcatagatgagattgactctatgttaacagctcgctctgataatgaaaatgagtccagcaggagaattaaaacagaacttcttattcagtggtcctccttatctagtgctactgcacaaagtgaagacagaaataatacgcttgacagcagagtacttgtcttaggagcaacgaatttgccatgggcgattgatgatgcagcaagaagaagattttctagaaaactttacattcctttaccagattatgaaactagattatatcatttgaagagattaatggccaagcagaaaaatagcttacaagatttagactatgaattaataacagaaatgaccgaggggttttctggttctgatcttacgtctttagccaaagaagcggcaatggaacctattagagatttaggagataagttgatgtttgcggattttgataaaatcagaggaattgaaataaaagattttcagaatgctttattgacaataaaaaagagcgtgtcttctgaatctttacaaaaatatgaggagtggtctagtaaattcggtagtaatggttcctga

SEQ ID NO: 11291 - DNA, 1500 bp, Saccharomyces cerevisiae
atgtcttggataaaaaatgtaacagaatctccgacttcactgattaaaaaagtttcatgtggtttgataattgctgcttctctatatgccattgcacccagcctaagtgcgctagtctttggggattctaagcagagtattgggaagtacacgacagtgggcttaattaatcgtgggaatgattgcttcataacatcatctttgcaaggcctggctggaatacctcgatttgtagaatatttgaaacggataagaacggtccttctagaattagaaactaagctgtcaaataatgcaaaaggcgacaatcctacagttgataacactacaaggcatagtcgacttgaaaactcgtctaattcacttgcccccttacacgaaagtcttaccagtttaattttggatttgatatctgtaaaagatcgtaagacgtcaatttctccgaaaatagtgataaacacattagagtccatctttaaatcaaagatctcatccaaacaaaatgatgcacatgaatttacattaatattactacaaacattacaggaagaacgatcaaaattgatcgattacagtaaacagatatgtaatttgaatataccaaagtttccatttgagggcgagacttccaagtttctagtatgccttaaatgcaagggtctatcagaaccatcatacaaacagactttcatccgcgaactgtccgtaccacaacaaacatcagagaatctatccaatattctagcacacgatgaaacagaaatcatagacgactattcatgcctgatctgccaaataagagcaatcttaaaccatgaagaatatagaaatttcaaggactgtaccccggatgaaattttaatgttggacagattgaaaaattatgccactaaagccccaattaacgaaaatttaccattcgaagtagaacagtacgtcaagcgttactcaaagggcaatttgcaggtatctaatataaagggaaaggtcatcaaaaaagatgtagtagtacaactgccagacatattaattgttcacttatcgagatccacattcaatggtattacatattctagaaatccctgcaatgtcaaatttggagaaagaataacactttctgaatatacattggctgagagtgggacaataacagaaaacaggcaagtcaaatataatttgaaaagtgttgtgaaacacaccggttctcattcgagtggacactatatgtgttacagacgcaagactgaaattcgtttcgggaaggaggatgaatcttccttcagaagagcaccagttgtcaacaatgaagttaacaagaatcgcgagcaaaacgttgcacataatgattacaaaaaaagcagatataaaaaagtcaaaaacgccctgcggtatccttattggcaaatatctgataccgccataaaggaatctaccgcttcaactgtcttgaatgaacagaaatatgcttatatgctatactacgaacgtgtaaataaataa

SEQ ID NO: 11292 - DNA, 1500 bp, Artificial Sequence
  Description of Artificial Sequence: Synthetic polynucleotide
atgtcttggataaaaaatgtaacagaatctccgacttctttgattaaaaaagtttcttgtggtttgataattgctgcttctttgtatgccattgcacccagcttaagtgcgttggtctttggggattctaagcagagtattgggaagtacacgacagtgggcttaattaatcgtgggaatgattgcttcataacatcttctttgcaaggcttagctggaatacctagatttgtagaatatttgaaaagaataagaacggtccttttagaattagaaactaagttatccaataatgcaaaaggcgacaatcctacagttgataacactacaaggcatagtagacttgaaaactcttctaattctcttgcccccttacacgaaagtcttaccagtttaattttggatttgatatctgtaaaagatcgtaagacgtccatttctccgaaaatagtgataaacacattagagtccatctttaaatccaagatctcttccaaacaaaatgatgcacatgaatttacattaatattattacaaacattacaggaagaaagaagtaaattgatcgattacagtaaacagatatgtaatttgaatataccaaagtttccatttgagggcgagacttccaagtttttggtatgccttaaatgcaagggtttatctgaaccatcttacaaacagactttcatccgcgaattatccgtaccacaacaaacaagtgagaatttatccaatattttggcacacgatgaaacagaaatcatagacgactattcttgcttgatctgccaaataagagcaatcttaaaccatgaagaatatagaaatttcaaggactgtaccccggatgaaattttaatgttggacagattgaaaaattatgccactaaagccccaattaacgaaaatttaccattcgaagtagaacagtacgtcaagcgttactccaagggcaatttgcaggtatctaatataaagggaaaggtcatcaaaaaagatgtagtagtacaattaccagacatattaattgttcacttatctagatccacattcaatggtattacatattctagaaatccctgcaatgtcaaatttggagaaagaataacactttctgaatatacattggctgagagtgggacaataacagaaaacaggcaagtcaaatataatttgaaaagtgttgtgaaacacaccggttctcattctagtggacactatatgtgttacagacgcaagactgaaattcgtttcgggaaggaggatgaatcttccttcagaagagcaccagttgtcaacaatgaagttaacaagaatcgcgagcaaaacgttgcacataatgattacaaaaaaagcagatataaaaaagtcaaaaacgccttgagatatccttattggcaaatatctgataccgccataaaggaatctaccgcttccactgtcttgaatgaacagaaatatgcttatatgctttactacgaacgtgtaaataaatga

SEQ ID NO: 11293 - DNA, 471 bp, Saccharomyces cerevisiae
atgagttcccggtttgcaagaagtaatggcaatcccaaccacattaggaaaagaaatcattctccagacccaataggaattgataattataaaagaaaaagactaattatagatttagagaatttatccttaaatgataaagggcccaagaacggacatgcagatgataacaatcttattcataacaatatagtattcacagacgctattgatgataaggtcctgaaagagatcatcaagtgttccacaagtaaacgcggcgacaatgacttgttttatgacaaaatatgggaacgtttgagagaaaaaaggctacaaataataaaatgggtagattataaggaaattgcttatctaagctggtggaagtggttccataatcaaatgacttcgaaatacacttatgatggagaggctgataccgatgttgaaatgatggcagtggatactgatgtggatatggatgcgtaa

SEQ ID NO: 11294 - DNA, 471 bp, Artificial Sequence
  Description of Artificial Sequence: Synthetic polynucleotide
atgagttccagatttgcaagaagtaatggcaatcccaaccacattaggaaaagaaatcattctccagacccaataggaattgataattataaaagaaaaagattgattatagatttagagaatttatccttaaatgataaagggcccaagaacggacatgcagatgataacaatcttattcataacaatatagtattcacagacgctattgatgataaggtcttgaaagagatcatcaagtgttccacaagtaaacgcggcgacaatgacttgttttatgacaaaatatgggaacgtttgagagaaaaaaggttacaaataataaaatgggtagattataaggaaattgcttatttgagctggtggaagtggttccataatcaaatgacttctaaatacacttatgatggagaggctgataccgatgttgaaatgatggcagtggatactgatgtggatatggatgcgtga

SEQ ID NO: 11295 - DNA, 1839 bp, Saccharomyces cerevisiae
atggctagacaattattcactcctccgataaccaatccaaggtttgaccctaatcaatccatcagggaatcatacaagaacacaactggcggcatgcaatttcaacaaaatctacatgaggatcaaaatgacaatgagagaagtagctgtgatggtgatgaaaactctacaacaggagaaaggctagaaaacaataagtctcctatattgacaaaacaagaaattgacgaagcgttgaacactgtcaccaatttacctccagaattatcaaaattaattgacatttttattgatgacctaaagcagccaaagtacgtacggccactatcagtactgcaattgtctagtcttttccaaagcttttacataaaatttgataaagcatcattccagcacgtcagttcagcgaataataatggctattatttttctggcgggggctctagttcattcttggctgccaaagaaacgttaagtagtggtcttagcggaatttttggcagaagtaggagtagtagtggaaattcacttatgaggccaagaagatcttcatcgcttttcagtaatgagtcaatatcaaattcaactaatgccacacaaatgttgtcacctgaagagataaaaaagcaattgaaaatcaacgaattaaacaacatgaaaatcgaaaaatatatggaactttgtgaaagagatgtttttaagaaaattcttatagtaggcacatccgtatcttcaccgaataaaatgaaaaccttcaaaccacaccaattacaaactttcaaggttggaaatctatttagaaacagtgttgaattcacagaatacaataagttgttgaatgaaaaaatcctctgtttgtccaaactctcaacaatgaataaaatcaatttgataaagtttctgagtcttaataatggcattgatccggaaccaaagtttgaagagatcaaagatattttatatgagtttacttatcattcgatttcaccatgtgaaaagataaaggccctactgaaactacatgaaatcatgacatattcccaagaaatgtctaatgatgattatctttcgttgctaatctactacattattacgattgttccacgggatattttcttgaatgccgaattcatcaggctgttcagatataagaaaaagctggtcgaaacagaatcctttgcattaaccaatctagaagctgcattagtttttgttgaaggcttaaccaaaaatgatttttcaaatgagctacaagataaattgactgtaaatgaaagtaaaattttagaaaattcaatcagcagtagagtctcattgccatcaaaaactgctataatgcataaaaacaacggtaataacggcagtaacctaggtgacatcgtgactcctactatccaaaggccagatgttacaagatcgaattcgtatgatggcttcaggaccgtttttgattcatcattaaaaaatatcatcggaaaaattaggtcatatactccaccacatcctaacaatactagcaataataaccttcacagtagcaacaacttaaacataccacgaagttcgtctcaattatccatggaattgagcaatagagatacaacagagatgtctagggatggctcacgatcaacttcatcatcttcacgatcttcagcatctttagagcacggaaatcgcgaatttaccggcgatttgacagtaaccgctagcattaacggtgctgataaaaaggagtttcagaaatcgtggaaaaaatataaaggctataaatttgaagatttgactatttgcgaactaagagatctttttgagatatatcaaaagatgatgcaatga

SEQ ID NO: 11296 - DNA, 1839 bp, Artificial Sequence
  Description of Artificial Sequence: Synthetic polynucleotide
atggctagacaattattcactcctccgataaccaatccaaggtttgaccctaatcaatccatcagggaatcttacaagaacacaactggcggcatgcaatttcaacaaaatttacatgaggatcaaaatgacaatgagagaagtagctgtgatggtgatgaaaactctacaacaggagaaaggttagaaaacaataagtctcctatattgacaaaacaagaaattgacgaagcgttgaacactgtcaccaatttacctccagaattatccaaattaattgacatttttattgatgacttgaagcagccaaagtacgtaagaccattaagtgtattacaattgtctagtcttttccaaagcttttacataaaatttgataaagcatctttccagcacgtcagttctgcgaataataatggctattatttttctggcgggggctctagttctttcttggctgccaaagaaacgttaagtagtggtcttagcggaatttttggcagaagtaggagtagtagtggaaattctcttatgaggccaagaagatcttcttctcttttcagtaatgagagtatatccaattctactaatgccacacaaatgttgtctcctgaagagataaaaaagcaattgaaaatcaacgaattaaacaacatgaaaatcgaaaaatatatggaactttgtgaaagagatgtttttaagaaaattcttatagtaggcacatccgtatcttctccgaataaaatgaaaaccttcaaaccacaccaattacaaactttcaaggttggaaatttatttagaaacagtgttgaattcacagaatacaataagttgttgaatgaaaaaatcctctgtttgtccaaactctccacaatgaataaaatcaatttgataaagtttttgagtcttaataatggcattgatccggaaccaaagtttgaagagatcaaagatattttatatgagtttacttatcattctatttctccatgtgaaaagataaaggccttattgaaattgcatgaaatcatgacatattcccaagaaatgtctaatgatgattatctttctttgttgatctactacattattacgattgttccaagagatattttcttgaatgccgaattcatcaggttgttcagatataagaaaaagttggtcgaaacagaatcctttgcattaaccaatttggaagctgcattagtttttgttgaaggcttaaccaaaaatgatttttctaatgagttacaagataaattgactgtaaatgaaagtaaaattttagaaaattccatcagcagtagagtctctttgccatctaaaactgctataatgcataaaaacaacggtaataacggcagtaacttgggtgacatcgtgactcctactatccaaaggccagatgttacaagatctaattcttatgatggcttcaggaccgtttttgattcttctttaaaaaatatcatcggaaaaattaggagttatactccaccacatcctaacaatactagcaataataaccttcacagtagcaacaacttaaacataccaagaagttcttctcaattatccatggaattgagcaatagagatacaacagagatgtctagggatggcagtagatctacttcttcttcttctcgttcttctgcatctttagagcacggaaatcgcgaatttaccggcgatttgacagtaaccgctagcattaacggtgctgataaaaaggagtttcagaaaagttggaaaaaatataaaggctataaatttgaagatttgactatttgcgaattgagagatctttttgagatatatcaaaagatgatgcaatga

SEQ ID NO: 11297 - DNA, 1008 bp, Saccharomyces cerevisiae
atggaggccaagatagatgagctgatcaataatgatcctgtttggtccagccaaaatgaaagcttgatttcaaaaccttataatcacatccttttgaaacctggcaagaactttagactaaatttaatagttcaaattaacagagttatgaatttgcccaaagaccagctggccatagtttcgcaaattgttgagctcttgcataattccagccttttaatcgacgatatagaagataatgctcccttgagaaggggacagaccacttctcacttaatcttcggtgtaccctccactataaacaccgcaaattatatgtatttcagagccatgcaacttgtatcgcagctaaccacaaaagagcctttgtatcataatttgattacgattttcaacgaagaattgatcaatctacataggggacaaggcttggatatatactggagagactttctgcctgaaatcatacctactcaggagatgtatttgaatatggttatgaataaaacaggcggccttttcagattaacgttgagactcatggaagcgctgtctccttcctcacaccacggccattcgttggttcctttcataaatcttctgggtattatttatcagattagagatgattacttgaatttgaaagatttccaaatgtccagcgaaaaaggctttgctgaggacattacagaggggaagttatcttttcccatcgtccacgcccttaacttcactaaaacgaaaggtcaaactgagcaacacaatgaaattctaagaattctcctgttgaggacaagtgataaagatataaaactaaagctgattcaaatactggaattcgacaccaattcattggcctacaccaaaaattttattaatcaattagtgaatatgataaaaaatgataatgaaaataagtatttacctgatttggcttcgcattccgacaccgccaccaatttacatgacgaattgttatatataatagaccacttatccgaattgtga

SEQ ID NO: 11298 - DNA, 1008 bp, Artificial Sequence
  Description of Artificial Sequence: Synthetic polynucleotide
atggaggccaagatagatgagttgatcaataatgatcctgtttggtccagccaaaatgaaagcttgatttccaaaccttataatcacatccttttgaaacctggcaagaactttagattgaatttaatagttcaaattaacagagttatgaatttgcccaaagaccagttggccatagtttctcaaattgttgagctcttgcataattccagccttttaatcgacgatatagaagataatgctcccttgagaaggggacagaccacttctcacttaatcttcggtgtaccctccactataaacaccgcaaattatatgtatttcagagccatgcaacttgtatctcagttgaccacaaaagagcctttgtatcataatttgattacgattttcaacgaagaattgatcaatttacataggggacaaggcttggatatatactggagagactttttacctgaaatcatacctactcaggagatgtatttgaatatggttatgaataaaacaggcggccttttcagattaacgttgagactcatggaagcgctttctccttcctcccaccacggccattctttggttcctttcataaatcttttgggtattatttatcagattagagatgattacttgaatttgaaagatttccaaatgtccagcgaaaaaggctttgctgaggacattacagaggggaagttatcttttcccatcgtccacgcccttaacttcactaaaacgaaaggtcaaactgagcaacacaatgaaattttaagaattctcttattgaggacaagtgataaagatataaaattgaagttgattcaaatattggaattcgacaccaattctttggcctacaccaaaaattttattaatcaattagtgaatatgataaaaaatgataatgaaaataagtatttacctgatttggcttctcattccgacaccgccaccaatttacatgacgaattgttatatataatagaccacttatccgaattgtga

SEQ ID NO: 11299 - DNA, 882 bp, Saccharomyces cerevisiae
atgcatatgcaactcaggaaaagaaaaagggttgactattcagggagaaatcagacgtccgatcctccttcaaccacaacggcagcggtaccatccattattgtccctaagaagcgtaaagtagtcgcacaaaacatggttagtccagctattcgagccacaaccacaacactgggcacctcaaatataataatacctaagcctctgcagcgccctaaattccacaatagcgccagcctatcttcacctgatgatgatcccgaaaagatctctgtattggaagttcagaaaaatttgtccaatctcatcaaaagacaacaaagattattttataaagatatacataagccgactctcgccggcttgaaaaatttcgaaatgttaaggctgcccaatgatctaaaactcctacaaaacatcgtaaacctattatattcattcgagcaattaaacagtgactcgaagacaagaccagtcactacttccaaattaaaggcctcctctcaagcgcactcagacaaattgaaaaaaatgctagctgagaggaaacctccatttagccaccccagtcacagcggcactgcctaccacaatgacatcatccatgagatagcgaatttgcattctattaacctggtagatttgattaatttggaagtatataataacaattgccatacaaacaacacagcgttgcaaactacggcgaattcgctgacacttaatagcattatcaaaaagcttgacaagccaatactgaaagaaagaaataattctctggtatggccccataaaagcagatttaaagcaaaaaggaaccaaccttcgcctggccaatctttaattaacaatacagatataactctctacaacgatgtatag

SEQ ID NO: 11300 - DNA, 882 bp, Artificial Sequence
  Description of Artificial Sequence: Synthetic polynucleotide
atgcatatgcaactcaggaaaagaaaaagggttgactattctgggagaaatcagacgtccgatcctccttctaccacaacggcagcggtaccatccattattgtccctaagaagcgtaaagtagtcgcacaaaacatggttagtccagctattagagccacaaccacaacattaggcacctctaatataataatacctaagcctttgcagcgccctaaattccacaatagcgccagcttgtcttctcctgatgatgatcccgaaaagatctctgtattggaagttcagaaaaatttgtccaatctcatcaaaagacaacaaagattattttataaagatatacataagccgactctcgccggcttgaaaaatttcgaaatgttaaggttacccaatgatttgaaactcttacaaaacatcgtaaacttattatattctttcgagcaattaaacagtgactccaagacaagaccagtcactacttccaaattaaaggcctcctctcaagcgcactctgacaaattgaaaaaaatgttggctgagaggaaacctccatttagccaccccagtcacagcggcactgcctaccacaatgacatcatccatgagatagcgaatttgcattctattaacttggtagatttgattaatttggaagtatataataacaattgccatacaaacaacacagcgttgcaaactacggcgaattctttaacacttaatagcattatcaaaaagcttgacaagccaatattgaaagaaagaaataattctttagtatggccccataaaagcagatttaaagcaaaaaggaaccaaccttctcctggccaatctttaattaacaatacagatataactctctacaacgatgtatga

SEQ ID NO: 11301 - DNA, 597 bp, Saccharomyces cerevisiae
atgcaacaagatatcgtcaacgatcaccaggaggaggcccaagggtggaagtgggaacaaatcaaagagataattgaatcgggggagcttgcccgtttgaaacgaagtcgccagatgactgacaaataccacgagcataagaaaaggactgctggcctggacatgaaccagtacgttttgcaaaaactaggctggtcgctagacgaaccgcagctcgaaaatgctgccgcgaaggcttttagttcttctactctatatgctgtgcgtgccaacgatttcccgtataacttcgagcctggtgttgtacaccttgttctctggtccaaggttgccctgccagtacattccccagataaggccgtgcgcgaagcggcccgcgctcgcatgaatgcatttttgcaggcacagccgctactgcgtccacttctaagctcgggtcacgtggcctggtttgtcaactacccggaactacaaagtgttgcccggattttccacgctcacgtgctgcttttcttcccacgggaacgctattccgcggaacaggtaaaaacgaccgttgatgatatcctttcacacggtttcgagccacttgcctga

SEQ ID NO: 11302 - DNA, 597 bp, Artificial Sequence
  Description of Artificial Sequence: Synthetic polynucleotide
atgcaacaagatatcgtcaacgatcaccaggaggaggcccaagggtggaagtgggaacaaatcaaagagataattgaatctggggagcttgcccgtttgaaaagaagtcgccagatgactgacaaataccacgagcataagaaaaggactgctggccttgacatgaaccagtacgttttgcaaaaattgggctggtctttggacgaaccgcagctcgaaaatgctgccgcgaaggcttttagttcttctactttatatgctgtgcgtgccaacgatttcccgtataacttcgagcctggtgttgtacaccttgttctctggtccaaggttgccttaccagtacattccccagataaggccgtgcgcgaagcggcccgcgctcgcatgaatgcatttttgcaggcacagccgttattacgtccacttttgagcagtggtcacgtggcctggtttgtcaactacccggaattacaaagtgttgccagaattttccacgctcacgtgttgcttttcttcccaagagaacgctattccgcggaacaggtaaaaacgaccgttgatgatatcctttctcacggtttcgagccacttgcctga

SEQ ID NO: 11303 - DNA, 1440 bp, Saccharomyces cerevisiae
atgacgcacccagttatatcactaaagccaagctacaattctgtaatacggggctgccccggtttacctgatacgttaccacgaatcgaatgccagttaagagtgcgctcaaacaactctttgccattcaaattggtaaagatcgaaattgttttaaagacaattgaaatatatttcaacaaaaacctttatagcagcaataacagctctttcaccccatttaatcgtccgtcggacccctctaatggccattctgacaccagtaaccagaacatcagcattcattataagaaaaacatcgtgttatcccaccctacccatgatggcgacgatctcaacaatgatcttattggcatagacatacctttgacgattgggctacctgacgacatcaaagaaacaaactataatccgaaattcggcaaaacgcagactttcctggattgtaccgtgttttatacagaggtcggcggaggaagctcaaataagaaaagaaattttctttacccagtaaacgtcgaaaggtatacatacctaccttcaccgtcatatttcaggccaataaacagatcaaacatcacttctcccgatcaaaagttcttaattagttattccattgagaatccctgtgtttctatgaataatgacacgttgaaactctccatatcaatcaggctgaacccatttccgaacaatgccacaactccctcttcgaatgactttgatgtgtccacgccgacacttttctccacaaagaaaaagtttaagtccaagctcaaattgaaatcaattacaacacagatactagaatacttggaaattctgaagaaccaatcagaattctcatccacgcaaacaacaaatattttgcaaacctctgtaagacaggttgatcaaatcatctccatgaattcaatgatttttcaattcaacctaaaaatattcactaaggacaaaattttacaaagctttagatcttctgagtcgagttgtcccgaaactaaagtattaatcaacaaaatcgacgacattcctctgcaatatcatagttcgataactacgataggtcaacattttaatgtttctcactatctttcaataaggttcaaattcaataaaagtctgaaaaacttcgaaattaatcaccccctaatcatatcgttttggtcagtaagtcaattgccgctaatcgagaacctaatattgcaagaaagacaaactgctaaatttgccaagaagttttataaaaattttggtcgaatcaagaacacgagcaacaacaataacagctcgaactgtctagagtatccctccttgccgccaataatttataattttaacgacccagaaacaaataatagatttaatatattatactcgcaaaaggaccctagtcgtacggatccttctaaattgagaagagtacctgtcatacaatga

SEQ ID NO: 11304 - DNA, 1440 bp, Artificial Sequence
  Description of Artificial Sequence: Synthetic polynucleotide
atgacgcacccagttatatctttgaagccaagctacaattctgtaataagaggctgccccggtttacctgatacgttaccaagaatcgaatgccagttaagagtgcgctctaacaactctttgccattcaaattggtaaagatcgaaattgttttaaagacaattgaaatatatttcaacaaaaacctttatagcagcaataacagctctttcaccccatttaatcgtccgtctgacccctctaatggccattctgacaccagtaaccagaacatcagcattcattataagaaaaacatcgtgttatcccaccctacccatgatggcgacgatctcaacaatgatcttattggcatagacatacctttgacgattgggttgcctgacgacatcaaagaaacaaactataatccgaaattcggcaaaacgcagactttcttggattgtaccgtgttttatacagaggtcggcggaggaagcagtaataagaaaagaaattttctttacccagtaaacgtcgaaaggtatacatacttaccttctccgagctatttcaggccaataaacagatctaacatcacttctcccgatcaaaagttcttaattagttattccattgagaatccctgtgtttctatgaataatgacacgttgaaactctccatatccatcaggttaaacccatttccgaacaatgccacaactccctcttccaatgactttgatgtgtccacgccgacacttttctccacaaagaaaaagtttaagtccaagctcaaattgaaatccattacaacacagatattggaatacttggaaattttgaagaaccaaagtgaattctcttccacgcaaacaacaaatattttgcaaacctctgtaagacaggttgatcaaatcatctccatgaattctatgatttttcaattcaacttgaaaatattcactaaggacaaaattttacaaagctttagatcttctgagagcagttgtcccgaaactaaagtattaatcaacaaaatcgacgacattcctttacaatatcatagtagtataactacgataggtcaacattttaatgtttctcactatctttccataaggttcaaattcaataaaagtttgaaaaacttcgaaattaatcaccccttaatcatatccttttggtctgtaagtcaattgccgttgatcgagaacttgatattgcaagaaagacaaactgctaaatttgccaagaagttttataaaaattttggtagaatcaagaacacgagcaacaacaataacagcagtaactgtttagagtatccctccttgccgccaataatttataattttaacgacccagaaacaaataatagatttaatatattatactctcaaaaggaccctagtcgtacggatccttctaaattgagaagagtacctgtcatacaatga

SEQ ID NO: 11305 - DNA, 729 bp, Saccharomyces cerevisiae
atgcaaaaacacaatataaaattaaaccaaaaccaggatatttcccaattattccacgatgaagtacccttattcgacaactctataacttcaaaggataaagaagtcattgaaactttatctgaaatatattctatagtaatcacactagaccacgtagagaaagcctacctaaaagactccatagatgacacccaatacactaatactgttgacaaattactaaagcagttcaaggtctacctgaattctcagaataaagaagagataaacaagcatttccaatccatagaagcgttctgcgatacatacaacatcactgcttcgaacgcaataacaagactggagaggggcataccaattacagcagaacatgcgatatccactaccacatcggctccctctggtgataataaacaaagttcttctagcgacaaaaagtttaatgctaaatacgtcgctgaggccactggtaatttcatcactgtaatggatgctttgaaactaaactataatgcaaaagatcaattacatcccttattggctgaactgttaatcagcataaatcgcgtcaccagggatgattttgagaatagatcaaaactcattgactggattgtcagaataaataaactctcaattggtgacactttaactgaaacacaaattagagaacttctgtttgatctagaactagcctataaaagtttttatgctttactggattaa

SEQ ID NO: 11306 - DNA, 729 bp, Artificial Sequence
  Description of Artificial Sequence: Synthetic polynucleotide
atgcaaaaacacaatataaaattaaaccaaaaccaggatatttcccaattattccacgatgaagtacccttattcgacaactctataacttctaaggataaagaagtcattgaaactttatctgaaatatattctatagtaatcacattagaccacgtagagaaagcctacttgaaagactccatagatgacacccaatacactaatactgttgacaaattattgaagcagttcaaggtctacttgaattctcagaataaagaagagataaacaagcatttccaatccatagaagcgttctgcgatacatacaacatcactgcttctaacgcaataacaagattggagaggggcataccaattacagcagaacatgcgatatccactaccacatctgctccctctggtgataataaacaaagttcttctagcgacaaaaagtttaatgctaaatacgtcgctgaggccactggtaatttcatcactgtaatggatgctttgaaattgaactataatgcaaaagatcaattacatcccttattggctgaattattaatcagcataaatcgcgtcaccagggatgattttgagaatagaagtaaactcattgactggattgtcagaataaataaactctccattggtgacactttaactgaaacacaaattagagaacttttatttgatttggaattggcctataaaagtttttatgctttattagattga

SEQ ID NO: 11307 - DNA, 906 bp, Saccharomyces cerevisiae
atgtccagtaatatagaacctcagacaacagctaaatgtatactgtatacaacaaaggggaacattgccattgaattatgggctaaagaatgccctgagacatgtaagaggttcttatctatgctctcagatggcacattcaccaatggagaatttaaagagttaaagccaacacagtggctaatgtttaatgcaaatagtactggtgagtaccgtacagttgctgaggaaaaaaatcctcgtatacgcttcaatagagatggactcttgggatgggatagacgaaggaacacatggtttataactgtgctggcggattctaagcacgtactgaacgattgtaatgtatttggcaaaattgttgggaaatctatttacatctttagagagatcttgggcggcgaaattgaagcttcctcccgtgacaatgatgtcaaacgattcatgtatcctgcagttttgaaggatgttgagattaccataccattctttgaggacatctttggatcaaaaagaagactggaagataatgaaaaaaaagaacaagagccggcaaagaaacttgtgaaatcagcaaaagtaaagatggtttatgaagatgagcaagaggatgatgatggtgatgttcaaaagcttaagccaagaaagagaatgattctcccagcatggatcaaagatgatagtcgcagtgaaggaattaaactagacgcatccttagatcagccacaagaggcactaattagggaaaagacggagttgcatgataatgttgatgaggcaaccactaaagaaacggaaagtcaagaaaacatcaaggaagaaccaatggataaaagagagcgggaaactttggcaatgttgtcaaaatttcaagaacgaataaaaaacaagaatattctaaagtga

SEQ ID NO: 11308 - DNA, 906 bp, Artificial Sequence
  Description of Artificial Sequence: Synthetic polynucleotide
atgtccagtaatatagaacctcagacaacagctaaatgtatactttatacaacaaaggggaacattgccattgaattatgggctaaagaatgccctgagacatgtaagaggttcttatctatgctctctgatggcacattcaccaatggagaatttaaagagttaaagccaacacagtggttaatgtttaatgcaaatagtactggtgagtaccgtacagttgctgaggaaaaaaatcctcgtatacgcttcaatagagatggactcttgggatgggatagaagaaggaacacatggtttataactgtgttggcggattctaagcacgtattgaacgattgtaatgtatttggcaaaattgttgggaaatctatttacatctttagagagatcttgggcggcgaaattgaagcttcctcccgtgacaatgatgtcaaaagattcatgtatcctgcagttttgaaggatgttgagattaccataccattctttgaggacatctttggatctaaaagaagattagaagataatgaaaaaaaagaacaagagccggcaaagaaacttgtgaaatctgcaaaagtaaagatggtttatgaagatgagcaagaggatgatgatggtgatgttcaaaagcttaagccaagaaagagaatgattctcccagcatggatcaaagatgatagtcgcagtgaaggaattaaattagacgcatccttagatcagccacaagaggcattgattagggaaaagacggagttgcatgataatgttgatgaggcaaccactaaagaaacggaaagtcaagaaaacatcaaggaagaaccaatggataaaagagagagagaaactttggcaatgttgagtaaatttcaagaaagaataaaaaacaagaatattttgaagtga

SEQ ID NO: 11309 - DNA, 1431 bp, Saccharomyces cerevisiae
atgctgtccattttaagaaattcggtgagactaaattcaagggctcttagggttgtgccatctgccgccaacaccttaacatcggttcaagcatccagaagacttttaacaagttattcaagttttttacaaaaagaaacaaaagacgacaagcctaaatccattcttacagatgatatgctgttcaaggccggtgttgacgtcgatgagaagggccaaggcaaaaacgaggaaacatcaggagaaggaggagaggacaagaatgaaccttcttccaaaagtgaaaaatctagaagaaaaagacaaacttctacagatattaaaagagaaaagtatgctaactggttttacattttttcgttgtctgcgttgacaggtactgcaatctacatggcaagggattgggagcctcaagagtctgaagaattgaagaaagacatcgataatggctacactttatcacttatgtataaaagattcaaggccaggttcaactcaatgttcacctacttccaagagccacctttccctgatttactacctccaccaccaccaccaccgtaccaaaggccattaactcttgttatcacattggaagattttttggttcattctgagtggtctcaaaagcatggttggagaacggccaaaagacctggtgctgactacttcttgggttacctatcgcagtattacgaaattgttttgttttcatccaactatatgatgtactctgacaaaatcgctgaaaaattagatccaatccatgcattcgtatcttataatttgttcaaggaacactgtgtttacaaagacggtgtgcacattaaggatctgtcaaaattgaatagagatttgagtaaagtaatcattattgacactgaccctaacagttacaaattgcaacctgaaaatgctattccaatggagccatggaatggtgaagctgatgacaaattagtaagattgattccatttttggagtaccttgccactcaacaaaccaaggatgttagaccaatcttgaacagctttgaagacaagaagaacctagcagaagaatttgatcatcgtgtgaaaaaattgaaggataaattttacggagatcataaatctggtggcaactgggcaatgacggcactaggtctcggaaattccctgggcggcagcaccaagttcccgctcgatttgattcatgaagaaggacaaaagaactatttaatgttcatgaagatgattgaggaagaaaaggaaaaaattagaatacagcaggagcaaatgggcgggcaaacatttacgctgaaagactatgttgaaggtaacttgccttcgccagaagaacaaatgaaaatacaattggagaagcagaaggaggtagacgccttatttgaagaggaaaagaaaaagaagaagattgctgaatccaaataa

SEQ ID NO: 11310 - DNA, 1431 bp, Artificial Sequence
  Description of Artificial Sequence: Synthetic polynucleotide
atgctttccattttaagaaattctgtgagattgaattctagggctcttagggttgtgccatctgccgccaacaccttaacatctgttcaagcatccagaagacttttaacaagttattctagttttttacaaaaagaaacaaaagacgacaagcctaaatccattcttacagatgatatgcttttcaaggccggtgttgacgtcgatgagaagggccaaggcaaaaacgaggaaacatctggagaaggaggagaggacaagaatgaaccttcttccaaaagtgaaaaatctagaagaaaaagacaaacttctacagatattaaaagagaaaagtatgctaactggttttacattttttctttgtctgcgttgacaggtactgcaatctacatggcaagggattgggagcctcaagagtctgaagaattgaagaaagacatcgataatggctacactttatctcttatgtataaaagattcaaggccaggttcaactccatgttcacctacttccaagagccacctttccctgatttattgcctccaccaccaccaccaccgtaccaaaggccattaactcttgttatcacattggaagattttttggttcattctgagtggtctcaaaagcatggttggagaacggccaaaagacctggtgctgactacttcttgggttacttatctcagtattacgaaattgttttgttttcttccaactatatgatgtactctgacaaaatcgctgaaaaattagatccaatccatgcattcgtatcttataatttgttcaaggaacactgtgtttacaaagacggtgtgcacattaaggatttatccaaattgaatagagatttgagtaaagtaatcattattgacactgaccctaacagttacaaattgcaacctgaaaatgctattccaatggagccatggaatggtgaagctgatgacaaattagtaagattgattccatttttggagtaccttgccactcaacaaaccaaggatgttagaccaatcttgaacagctttgaagacaagaagaacttggcagaagaatttgatcatcgtgtgaaaaaattgaaggataaattttacggagatcataaatctggtggcaactgggcaatgacggcattgggtctcggaaattccttgggcggcagcaccaagttcccgctcgatttgattcatgaagaaggacaaaagaactatttaatgttcatgaagatgattgaggaagaaaaggaaaaaattagaatacagcaggagcaaatgggcgggcaaacatttacgttgaaagactatgttgaaggtaacttgccttctccagaagaacaaatgaaaatacaattggagaagcagaaggaggtagacgccttatttgaagaggaaaagaaaaagaagaagattgctgaatccaaatga

SEQ ID NO: 11311 - DNA, 405 bp, Saccharomyces cerevisiae
atgatagaattggattatgtaaaaggtgaagataccattgtagaagcaaccagcacgtcgccgtggctgatgaggtctcctcttgcccgggccgcagaaaagaggggcagtggcctgtttttcgacataaatgaggggcatggccagcaccgagacgtcattgttgcatatggcgtatccaagccgaaacggcgctcgcctcatccccacgggaataaggcagccgacaaaagaaaaacgaccgaaaaggaaccagaaagaaaaaagagggtgggcgcgccgcggacgtgtaaaaagatatgcatccagcttctatatcgctttaactttaccgttttgggcatcgggaacgtatgtaacattgatctcctcttgggaacggtgagtgcaacgaatgcgatatag

SEQ ID NO: 11312 - DNA, 405 bp, Artificial Sequence
  Description of Artificial Sequence: Synthetic polynucleotide
atgatagaattggattatgtaaaaggtgaagataccattgtagaagcaaccagcacgtctccgtggttaatgaggtctcctcttgccagagccgcagaaaagaggggcagtggcttatttttcgacataaatgaggggcatggccagcacagagacgtcattgttgcatatggcgtatccaagccgaaaagacgcagtcctcatccccacgggaataaggcagccgacaaaagaaaaacgaccgaaaaggaaccagaaagaaaaaagagggtgggcgcgccgaggacgtgtaaaaagatatgcatccagcttttatatcgctttaactttaccgttttgggcatcgggaacgtatgtaacattgatctcctcttgggaacggtgagtgcaacgaatgcgatatga

SEQ ID NO: 11313 - DNA, 1503 bp, Saccharomyces cerevisiae
atgactaagctacactttgacactgctgaaccagtcaagatcacacttccaaatggtttgacatacgagcaaccaaccggtctattcattaacaacaagtttatgaaagctcaagacggtaagacctatcccgtcgaagatccttccactgaaaacaccgtttgtgaggtctcttctgccaccactgaagatgttgaatatgctatcgaatgtgccgaccgtgctttccacgacactgaatgggctacccaagacccaagagaaagaggccgtctactaagtaagttggctgacgaattggaaagccaaattgacttggtttcttccattgaagctttggacaatggtaaaactttggccttagcccgtggggatgttaccattgcaatcaactgtctaagagatgctgctgcctatgccgacaaagtcaacggtagaacaatcaacaccggtgacggctacatgaacttcaccaccttagagccaatcggtgtctgtggtcaaattattccatggaactttccaataatgatgttggcttggaagatcgccccagcattggccatgggtaacgtctgtatcttgaaacccgctgctgtcacacctttaaatgccctatactttgcttctttatgtaagaaggttggtattccagctggtgtcgtcaacatcgttccaggtcctggtagaactgttggtgctgctttgaccaacgacccaagaatcagaaagctggcttttaccggttctacagaagtcggtaagagtgttgctgtcgactcttctgaatctaacttgaagaaaatcactttggaactaggtggtaagtccgcccatttggtctttgacgatgctaacattaagaagactttaccaaatctagtaaacggtattttcaagaacgctggtcaaatttgttcctctggttctagaatttacgttcaagaaggtatttacgacgaactattggctgctttcaaggcttacttggaaaccgaaatcaaagttggtaatccatttgacaaggctaacttccaaggtgctatcactaaccgtcaacaattcgacacaattatgaactacatcgatatcggtaagaaagaaggcgccaagatcttaactggtggcgaaaaagttggtgacaagggttacttcatcagaccaaccgttttctacgatgttaatgaagacatgagaattgttaaggaagaaatttttggaccagttgtcactgtcgcaaagttcaagactttagaagaaggtgtcgaaatggctaacagctctgaattcggtctaggttctggtatcgaaacagaatctttgagcacaggtttgaaggtggccaagatgttgaaggccggtaccgtctggatcaacacatacaacgattttgactccagagttccattcggtggtgttaagcaatctggttacggtagagaaatgggtgaagaagtctaccatgcatacactgaagtaaaagctgtcagaattaagttgtaa

SEQ ID NO: 11314 - DNA, 1503 bp, Artificial Sequence
  Description of Artificial Sequence: Synthetic polynucleotide
atgactaagttgcactttgacactgctgaaccagtcaagatcacacttccaaatggtttgacatacgagcaaccaaccggtcttttcattaacaacaagtttatgaaagctcaagacggtaagacctatcccgtcgaagatccttccactgaaaacaccgtttgtgaggtctcttctgccaccactgaagatgttgaatatgctatcgaatgtgccgaccgtgctttccacgacactgaatgggctacccaagacccaagagaaagaggccgtttgttaagtaagttggctgacgaattggaaagccaaattgacttggtttcttccattgaagctttggacaatggtaaaactttggccttagcccgtggggatgttaccattgcaatcaactgtttgagagatgctgctgcctatgccgacaaagtcaacggtagaacaatcaacaccggtgacggctacatgaacttcaccaccttagagccaatcggtgtctgtggtcaaattattccatggaactttccaataatgatgttggcttggaagatcgccccagcattggccatgggtaacgtctgtatcttgaaacccgctgctgtcacacctttaaatgccctttactttgcttctttatgtaagaaggttggtattccagctggtgtcgtcaacatcgttccaggtcctggtagaactgttggtgctgctttgaccaacgacccaagaatcagaaagttggcttttaccggttctacagaagtcggtaagagtgttgctgtcgactcttctgaatctaacttgaagaaaatcactttggaattgggtggtaagtccgcccatttggtctttgacgatgctaacattaagaagactttaccaaatttggtaaacggtattttcaagaacgctggtcaaatttgttcctctggttctagaatttacgttcaagaaggtatttacgacgaattattggctgctttcaaggcttacttggaaaccgaaatcaaagttggtaatccatttgacaaggctaacttccaaggtgctatcactaaccgtcaacaattcgacacaattatgaactacatcgatatcggtaagaaagaaggcgccaagatcttaactggtggcgaaaaagttggtgacaagggttacttcatcagaccaaccgttttctacgatgttaatgaagacatgagaattgttaaggaagaaatttttggaccagttgtcactgtcgcaaagttcaagactttagaagaaggtgtcgaaatggctaacagctctgaattcggtttaggttctggtatcgaaacagaatctttgagcacaggtttgaaggtggccaagatgttgaaggccggtaccgtctggatcaacacatacaacgattttgactccagagttccattcggtggtgttaagcaatctggttacggtagagaaatgggtgaagaagtctaccatgcatacactgaagtaaaagctgtcagaattaagttgtga

SEQ ID NO: 11315 - DNA, 1242 bp, Saccharomyces cerevisiae
atgagagcattcccccgagtactgccatttcgccatcagagatcatataataacatccttcttcgaacagtaaggctttttggttcatcactttcttcttttgatttctctaggcaaatgcctaaggtggaccctgacaataccgctgcaatgctactacagaaaaacttgatccaaagaaacaacatgctctatgggtatggatcagggacaatacgatgtactttgctagactcaactggacgagccaaatcaccattagtagagataaaacgtgaggatctagtatcaaaacatggcttgttgcccagagatctacgtaaaattgaaaaatcaaggaagaatgacttagtccctagtttgctcgtgcgagaaaattccatactaatcagtttacttactgtgaaagccctaattaagcctgatatggttattatcttcgattcagccggcagtggaataactttaaactcagaagctcacaaggattttattaacgatatgaaattgagactaaaaaatcaagaaacaagcgagctaaatagcgatccacttccttatgaattcagagctttagaaacgatcttcatttcggcattatctaaccttaccagtgaaatgaaggtgttgctaaccatatgcaagggggtgcttcaagatctagaatttagtataacaagagataaattaaggttcttactgggtcaaaacaaaaaattgagcagcttcaataaaaaggctgttctagttaaagatatgctggatgacttgctagagcaagacgatatgctttgtgatatgtacttaaccgacaaaaaggctggaaaaattagagttcaagatgatcatactgaaattgaaatgcttctggaaacatatcataactatgtcgatgaaatagttcagaaaagcgaaagcgccatatctgacgtgaaaaccacagaagaaatcatcaatataatcctagattctaacagaaacgaattaatgctgttagggataagatacgccataggaatgctttcgttgggaggcgctctattcctgggttctatctatggtatgaatctggaaagtttcatagaagaaagtaattatgcgtatttaactgtcaccattttggggttaatatctactgtttggctctatgcgaagggaatcagacatttgcataaattacaacgtatgacattattgagtaaaataaaaacagattccgttcacgaactgttgaagaaatag

SEQ ID NO: 11316 - DNA, 1242 bp, Artificial Sequence
  Description of Artificial Sequence: Synthetic polynucleotide
atgagagcattccccagagtattgccatttcgccatcagagatcttataataacatccttcttagaacagtaaggctttttggttcttctctttcttcttttgatttctctaggcaaatgcctaaggtggaccctgacaataccgctgcaatgttattgcagaaaaacttgatccaaagaaacaacatgctctatgggtatggatctgggacaataagatgtactttgttggactctactggaagagccaaatctccattagtagagataaaacgtgaggatttagtatccaaacatggcttgttgcccagagatttacgtaaaattgaaaaatctaggaagaatgacttagtccctagtttgctcgtgagagaaaattccatattgatcagtttacttactgtgaaagccttaattaagcctgatatggttattatcttcgattctgccggcagtggaataactttaaactctgaagctcacaaggattttattaacgatatgaaattgagattgaaaaatcaagaaacaagcgagttgaatagcgatccacttccttatgaattcagagctttagaaacgatcttcatttctgcattatctaaccttaccagtgaaatgaaggtgttgttgaccatatgcaagggggtgcttcaagatttggaatttagtataacaagagataaattaaggttcttattgggtcaaaacaaaaaattgagcagcttcaataaaaaggctgttttggttaaagatatgcttgatgacttgttggagcaagacgatatgctttgtgatatgtacttaaccgacaaaaaggctggaaaaattagagttcaagatgatcatactgaaattgaaatgcttttagaaacatatcataactatgtcgatgaaatagttcagaaaagcgaaagcgccatatctgacgtgaaaaccacagaagaaatcatcaatataatcttagattctaacagaaacgaattaatgcttttagggataagatacgccataggaatgctttctttgggaggcgctttattcttgggttctatctatggtatgaatttggaaagtttcatagaagaaagtaattatgcgtatttaactgtcaccattttggggttaatatctactgtttggctctatgcgaagggaatcagacatttgcataaattacaacgtatgacattattgagtaaaataaaaacagattccgttcacgaattattgaagaaatga

SEQ ID NO: 11317 - DNA, 453 bp, Saccharomyces cerevisiae
atgtttctcccaaaattcaatcccataaggtcattttcccccatcctccgggctaagactcttcttcgttaccaaaatcggatgtatttgagcacagagataagaaaagctattgaagatgccatcgaatcggctccagtggttcttttcatgaaaggtactcctgaatttcccaagtgtggattttcaagagcaaccattggattattaggaaatcaaggcgttgacccggccaaatttgcggcttataatgttttagaagacccagagctacgtgaaggtatcaaagagttttcagaatggccaactattccacagttatatgtaaacaaagaattcattggtggatgtgatgttattacaagtatggcacgctctggtgaattggccgatttgctagaagaggcacaggcattggtacctgaagaagaagaagaaaccaaagatcgttga

SEQ ID NO: 11318 - DNA, 453 bp, Artificial Sequence
  Description of Artificial Sequence: Synthetic polynucleotide
atgtttctcccaaaattcaatcccataaggtctttttcccccatcctcagagctaagactcttcttcgttaccaaaatagaatgtatttgagcacagagataagaaaagctattgaagatgccatcgaatctgctccagtggttcttttcatgaaaggtactcctgaatttcccaagtgtggattttccagagcaaccattggattattaggaaatcaaggcgttgacccggccaaatttgcggcttataatgttttagaagacccagagttgcgtgaaggtatcaaagagttttctgaatggccaactattccacagttatatgtaaacaaagaattcattggtggatgtgatgttattacaagtatggcacgctctggtgaattggccgatttgttggaagaggcacaggcattggtacctgaagaagaagaagaaaccaaagatcgttga

SEQ ID NO: 11319 - DNA, 4536 bp, Saccharomyces cerevisiae
atgtcttcgactgacgaacatattgagaaagacatttcgtcgagatcgaaccatgacgatgattatgctaattcggtacaatcctacgctgcctccgaaggccaagttgataatgaggatttggcagccacttctcagctatcccgtcacctttcaaacattctttccaatgaagaaggtattgaaaggttggagtctatggcgagagtcatttcacataagacaaagaaggaaatggactcttttgaaattaatgacttagattttgatttgcgctcactattacattatttgaggtctcgtcaattggaacagggaattgaacctggtgattctggtattgcctttaaaaacctaacagcagtcggtgttgatgcctctgctgcatatgggcctagtgttgaagagatgtttagaaatattgctagtataccggcacatctcataagtaaatttaccaagaaatctgatgtcccattaaggaatattattcaaaattgtacgggtgtcgttgaatctggtgaaatgttatttgtcgtcggtaggccaggtgcaggttgctccactttcctaaagtgtctatctggtgaaacttcagaattagttgatgtacaaggtgaattctcctatgatggtctggaccaaagcgaaatgatgtctaagtataaaggttacgttatttactgtcccgagcttgatttccatttcccaaaaattactgtgaaggaaacaatcgattttgccctaaaatgtaagactcctcgtgttagaattgacaaaatgacgagaaagcaatacgttgataacatcagagatatgtggtgtaccgtttttggtttaagacacacatatgccaccaaagtcggtaacgatttcgtaagaggtgtttctggtggtgaacgtaagcgtgtttccttggttgaagctcaggcaatgaatgcctccatctactcttgggataacgccacaagaggtttggatgcctctactgctttagagtttgcccaagccattagaacggctacaaatatggtaaacaactctgctattgttgctatttaccaagctggtgaaaatatttatgaattatttgataaaactactgttctatataacggtagacagatttacttcggtcctgctgataaagctgttggatatttccaaagaatgggttgggttaaaccaaacagaatgacctctgcggaatttttaacatccgtcacggtcgattttgaaaataggacattggatattaaacctggctatgaagataaagttccaaaatctagttcagagtttgaggaatactggttgaactctgaggattatcaggaacttttaagaacttatgatgattatcaaagtagacaccctgttaatgaaacgagagatagactggatgtggccaagaagcaaagactgcaacaaggccaaagagaaaattctcaatatgttgtcaattattggacacaagtttattattgtatgattcgtggttttcaaagggttaagggtgattcaacgtatactaaggtctacttaagttcttttttgatcaaagctttgattatcggttctatgttccacaaaattgatgacaaaagtcaatccaccacggcaggtgcttattctcgtggtggtatgttattctatgttttattgttcgcttctgttacttccttggccgaaattggtaactctttttctagtagacctgttattgtcaaacacaaatcatattccatgtaccatttgtctgcggaatcgttacaagagattatcactgagttccctactaaatttgtcgctattgtgatactatgtttgattacttactggattccatttatgaaatatgaagctggtgctttcttccagtatattttatatctactgactgtgcaacaatgtacttctttcattttcaagtttgttgctactatgagtaaatctggtgtggatgcccatgccgtcggtggtttatgggtcctgatgctttgtgtttatgctggttttgtcttgccaattggtgaaatgcatcattggattagatggcttcatttcattaatcctttaacttatgcttttgaaagtttagtttccactgaatttcaccacagggaaatgttgtgtagcgccttagtcccatctggtcctggttatgaaggtatttctattgctaaccaagtctgtgatgctgctggtgcggttaagggtaacttgtatgttagcggtgactcttacatcttacaccaatatcatttcgcatataagcatgcttggagaaattggggtgtgaacattgtgtggacttttggttatattgtgttcaatgtcatcttatcagaatatttgaaacctgttgagggaggaggtgacttgctgttatataagagaggtcatatgccggagttaggtaccgaaaatgcagatgcaagaaccgcttccagagaggaaatgatggaggctctgaatggtccaaatgtcgatttagaaaaggtcattgcagaaaaggacgttttcacctggaaccatctggactacaccattccatacgacggagctacaagaaaattattatcggatgtctttggttacgttaagcctggtaagatgaccgccttgatgggtgaatccggtgctggtaaaactaccttgttaaatgttttagcacaaagaatcaatatgggtgtcatcactggtgatatgttagtcaatgccaagcccttgcctgcttctttcaacagatcatgtggttatgttgcgcaagccgataatcatatggccgaattatctgttagggaatccctgagatttgcagccgagttaagacagcaaagttccgttccgttagaggagaaatatgaatatgttgaaaaaattatcacattgctaggtatgcaaaattacgctgaagccttagttggtaagactggtagaggtttgaacgttgaacagagaaagaagttatctattggtgttgaactggttgctaaaccatcattattattgtttttggatgagcctacctctggtctggactctcagtctgcttggtcaattgttcaattcatgagagccttagctgattctggtcaatccattttgtgtacgattcatcaaccctctgctaccttgtttgaacagtttgacagattgttgttgttaaagaaaggtggtaagatggtttactttggtgacattggtccaaattctgaaactttgttgaagtattttgaacgtcaatctggtatgaagtgtggtgtttctgaaaatccagctgaatatattttgaattgtattggtgccggtgccactgctagtgttaactctgattggcacgacttatggcttgcttccccagaatgtgccgctgcaagggctgaagttgaagaattacatcgtactttacctggtagagcagttaatgatgatcctgagttagctacaagatttgctgccagttacatgactcaaatcaaatgtgttttacgtagaacagctcttcaattttggagatcgcctgtctatatcagggccaaattctttgaatgtgtcgcatgtgctttgttcgtcggtttatcatatgttggtgtaaatcactctgttggtggtgccattgaggccttttcgtctattttcatgctattattgattgctctggctatgatcaatcaactgcacgtcttcgcttatgatagtagggaattatatgaggttagagaagccgcttctaacactttccattggagtgtcttgttattatgtcatgctgctgttgaaaacttttggtccacactttgtcagtttatgtgtttcatttgctactactggccagctcaattcagtggacgtgcatctcatgcaggtttcttcttcttcttctatgttttaattttcccattatattttgtcacatatggtctatggatcctgtacatgtctcctgatgttccctcagcttctatgattaattccaatttgtttgctgctatgttactgttctgtggtattttacaaccaagagagaaaatgcctgccttctggagaagattgatgtataatgtatcaccatttacctacgtggttcaagctttggttacaccattagttcacaataaaaaggtcgtttgtaatcctcatgaatacaacatcatggacccaccaagcggaaaaacttgtggtgagtttttatctacctatatggacaataataccggttatttggtaaatccaactgccaccgaaaactgtcaatattgcccatacactgttcaagatcaagttgtggctaaatacaatgtcaaatgggatcacagatggagaaactttggtttcatgtgggcttatatttgcttcaatattgccgctatgttgatttgttactatgttgtaagagttaaggtgtggtctttgaagtctgttttgaatttcaagaaatggtttaatgggccaagaaaggaaagacatgaaaaagataccaacattttccaaacagttccaggtgacgaaaataaaatcacgaagaaataa

SEQ ID NO: 11320 - DNA, 4536 bp, Artificial Sequence
  Description of Artificial Sequence: Synthetic polynucleotide
atgtcttctactgacgaacatattgagaaagacatttcttctagatctaaccatgacgatgattatgctaattctgtacaatcctacgctgcctccgaaggccaagttgataatgaggatttggcagccacttctcagttgtcccgtcacctttccaacattctttccaatgaagaaggtattgaaaggttggagtctatggcgagagtcatttctcataagacaaagaaggaaatggactcttttgaaattaatgacttagattttgatttgcgctctttattacattatttgaggtctcgtcaattggaacagggaattgaacctggtgattctggtattgcctttaaaaacttaacagcagtcggtgttgatgcctctgctgcatatgggcctagtgttgaagagatgtttagaaatattgctagtataccggcacatctcataagtaaatttaccaagaaatctgatgtcccattaaggaatattattcaaaattgtacgggtgtcgttgaatctggtgaaatgttatttgtcgtcggtaggccaggtgcaggttgctccactttcttgaagtgtttgtctggtgaaacttctgaattagttgatgtacaaggtgaattctcctatgatggtttggaccaaagcgaaatgatgtctaagtataaaggttacgttatttactgtcccgagcttgatttccatttcccaaaaattactgtgaaggaaacaatcgattttgccttgaaatgtaagactcctcgtgttagaattgacaaaatgacgagaaagcaatacgttgataacatcagagatatgtggtgtaccgtttttggtttaagacacacatatgccaccaaagtcggtaacgatttcgtaagaggtgtttctggtggtgaacgtaagcgtgtttccttggttgaagctcaggcaatgaatgcctccatctactcttgggataacgccacaagaggtttggatgcctctactgctttagagtttgcccaagccattagaacggctacaaatatggtaaacaactctgctattgttgctatttaccaagctggtgaaaatatttatgaattatttgataaaactactgttttatataacggtagacagatttacttcggtcctgctgataaagctgttggatatttccaaagaatgggttgggttaaaccaaacagaatgacctctgcggaatttttaacatccgtcacggtcgattttgaaaataggacattggatattaaacctggctatgaagataaagttccaaaatctagtagtgagtttgaggaatactggttgaactctgaggattatcaggaacttttaagaacttatgatgattatcaaagtagacaccctgttaatgaaacgagagatagattagatgtggccaagaagcaaagattacaacaaggccaaagagaaaattctcaatatgttgtcaattattggacacaagtttattattgtatgattcgtggttttcaaagggttaagggtgattctacgtatactaaggtctacttaagttcttttttgatcaaagctttgattatcggttctatgttccacaaaattgatgacaaaagtcaatccaccacggcaggtgcttattctcgtggtggtatgttattctatgttttattgttcgcttctgttacttccttggccgaaattggtaactctttttctagtagacctgttattgtcaaacacaaaagttattccatgtaccatttgtctgcggaatctttacaagagattatcactgagttccctactaaatttgtcgctattgtgatattatgtttgattacttactggattccatttatgaaatatgaagctggtgctttcttccagtatattttatatttattaactgtgcaacaatgtacttctttcattttcaagtttgttgctactatgagtaaatctggtgtggatgcccatgccgtcggtggtttatgggtcttgatgctttgtgtttatgctggttttgtcttgccaattggtgaaatgcatcattggattagatggcttcatttcattaatcctttaacttatgcttttgaaagtttagtttccactgaatttcaccacagggaaatgttgtgtagcgccttagtcccatctggtcctggttatgaaggtatttctattgctaaccaagtctgtgatgctgctggtgcggttaagggtaacttgtatgttagcggtgactcttacatcttacaccaatatcatttcgcatataagcatgcttggagaaattggggtgtgaacattgtgtggacttttggttatattgtgttcaatgtcatcttatctgaatatttgaaacctgttgagggaggaggtgacttgttattatataagagaggtcatatgccggagttaggtaccgaaaatgcagatgcaagaaccgcttccagagaggaaatgatggaggctttgaatggtccaaatgtcgatttagaaaaggtcattgcagaaaaggacgttttcacctggaaccatttggactacaccattccatacgacggagctacaagaaaattattaagtgatgtctttggttacgttaagcctggtaagatgaccgccttgatgggtgaatccggtgctggtaaaactaccttgttaaatgttttagcacaaagaatcaatatgggtgtcatcactggtgatatgttagtcaatgccaagcccttgcctgcttctttcaacagatcttgtggttatgttgcgcaagccgataatcatatggccgaattatctgttagggaatccttgagatttgcagccgagttaagacagcaaagttccgttccgttagaggagaaatatgaatatgttgaaaaaattatcacattgttgggtatgcaaaattacgctgaagccttagttggtaagactggtagaggtttgaacgttgaacagagaaagaagttatctattggtgttgaattggttgctaaaccatctttattattgtttttggatgagcctacctctggtttggactctcagtctgcttggtctattgttcaattcatgagagccttagctgattctggtcaatccattttgtgtacgattcatcaaccctctgctaccttgtttgaacagtttgacagattgttgttgttaaagaaaggtggtaagatggtttactttggtgacattggtccaaattctgaaactttgttgaagtattttgaacgtcaatctggtatgaagtgtggtgtttctgaaaatccagctgaatatattttgaattgtattggtgccggtgccactgctagtgttaactctgattggcacgacttatggcttgcttccccagaatgtgccgctgcaagggctgaagttgaagaattacatcgtactttacctggtagagcagttaatgatgatcctgagttagctacaagatttgctgccagttacatgactcaaatcaaatgtgttttacgtagaacagctcttcaattttggagatctcctgtctatatcagggccaaattctttgaatgtgtcgcatgtgctttgttcgtcggtttatcttatgttggtgtaaatcactctgttggtggtgccattgaggccttttcttctattttcatgcttttattgattgctttggctatgatcaatcaattacacgtcttcgcttatgatagtagggaattatatgaggttagagaagccgcttctaacactttccattggagtgtcttgttattatgtcatgctgctgttgaaaacttttggtccacactttgtcagtttatgtgtttcatttgctactactggccagctcaattcagtggacgtgcatctcatgcaggtttcttcttcttcttctatgttttaattttcccattatattttgtcacatatggtttatggatcttgtacatgtctcctgatgttccctctgcttctatgattaattccaatttgtttgctgctatgttattattctgtggtattttacaaccaagagagaaaatgcctgccttctggagaagattgatgtataatgtatctccatttacctacgtggttcaagctttggttacaccattagttcacaataaaaaggtcgtttgtaatcctcatgaatacaacatcatggacccaccaagcggaaaaacttgtggtgagtttttatctacctatatggacaataataccggttatttggtaaatccaactgccaccgaaaactgtcaatattgcccatacactgttcaagatcaagttgtggctaaatacaatgtcaaatgggatcacagatggagaaactttggtttcatgtgggcttatatttgcttcaatattgccgctatgttgatttgttactatgttgtaagagttaaggtgtggtctttgaagtctgttttgaatttcaagaaatggtttaatgggccaagaaaggaaagacatgaaaaagataccaacattttccaaacagttccaggtgacgaaaataaaatcacgaagaaatga

SEQ ID NO: 11321 - DNA, 1149 bp, Saccharomyces cerevisiae
atgagaaaagaattaaaataccttatctgcttcaacatactcctcctgttatctataatatactacactttcgatttgctaacgttgtgtattgacgatactgttaaagatgctatacttgaggaagacttaaatccagatgcacctccaaagcctcaactaatacctaaaatcatacatcagacttataaaacggaagacatccctgagcactggaaagagggtagacaaaaatgtctcgatctacatccagattacaagtacatcctatggacggacgagatggcctatgagtttataaaggaagaatacccgtggtttctcgatacttttgagaactacaaataccccatagaacgtgccgatgccattcgttactttatcctgtcccattatggtggtgtatacatcgatttagatgacggctgcgaaaggaaactagatcctttgttagctttcccggccttcttaagaaagacttcacctttaggtgtctcaaacgatgtcatgggttctgtgcctagacatcccttctttttaaaggctttaaagtctttgaaacactatgacaagtactggtttatcccttacatgactattatggggtctactggtccgttgtttttaagtgttatttggaagcagtacaaaagatggcgcatacctaagaacgggacagtaagaatcctacaacctgcttactacaagatgcatagttattcatttttctccattactaaaggctcttcatggcatttagatgatgcaaaattgatgaaagcactagaaaaccacatcttatcctgcgtcgttaccggatttatttttggcttctttatcctatatggtgaattcacgttctattgctggttgtgttccaagaatttcagtaatctaaccaaaaattggaaacttaatgctataaaagtaagatttgtcacaattctaaattcattaggcttaagactaaagttgagtaaaagtaccagtgatactgccagtgccactttgctggcaaggcagcagaaacgattgaggaaagattccaatacaaacatagtgttactaaaatcttcaaggaaaagtgatgtttacgatttagaaaagaatgattcttctaagtactcactgggaaataacagctcgtaa

SEQ ID NO: 11322 - DNA, 1149 bp, Artificial Sequence
  Description of Artificial Sequence: Synthetic polynucleotide
atgagaaaagaattaaaataccttatctgcttcaacatactcctcttgttatctataatatactacactttcgatttgttgacgttgtgtattgacgatactgttaaagatgctatacttgaggaagacttaaatccagatgcacctccaaagcctcaattgatacctaaaatcatacatcagacttataaaacggaagacatccctgagcactggaaagagggtagacaaaaatgtctcgatttgcatccagattacaagtacatcttatggacggacgagatggcctatgagtttataaaggaagaatacccgtggtttctcgatacttttgagaactacaaataccccatagaacgtgccgatgccattcgttactttatcttgtcccattatggtggtgtatacatcgatttagatgacggctgcgaaaggaaattggatcctttgttagctttcccggccttcttaagaaagacttctcctttaggtgtctccaacgatgtcatgggttctgtgcctagacatcccttctttttaaaggctttaaagtctttgaaacactatgacaagtactggtttatcccttacatgactattatggggtctactggtccgttgtttttaagtgttatttggaagcagtacaaaagatggcgcatacctaagaacgggacagtaagaatcttgcaacctgcttactacaagatgcatagttattcttttttctccattactaaaggctcttcttggcatttagatgatgcaaaattgatgaaagcattggaaaaccacatcttatcctgcgtcgttaccggatttatttttggcttctttatcttatatggtgaattcacgttctattgctggttgtgttccaagaatttcagtaatttgaccaaaaattggaaacttaatgctataaaagtaagatttgtcacaattttgaattctttaggcttaagattaaagttgagtaaaagtaccagtgatactgccagtgccactttgttggcaaggcagcagaaaagattgaggaaagattccaatacaaacatagtgttattgaaatcttccaggaaaagtgatgtttacgatttagaaaagaatgattcttctaagtactctttgggaaataacagcagttga

SEQ ID NO: 11323 - DNA, 306 bp, Saccharomyces cerevisiae
atgaagaacgcagcattgtgtgaggctcttcctctgctcgccacgtgctcccacgaaatcccacccacaccacacacggtctgtttcgtcttcccccccgcattattactatccccgagcaaactcacacttttgaattcgcgtcgcgtcgcgtcgcgctgcgtcattatcattgacccacgcttgctgcgtctcttctcttgctcccggccacaacaactcccccgggataaaaaccaatcttttgctaagccatctttttctttttttttctttcttcttacctcgttattatcgcctttctaa

SEQ ID NO: 11324 - DNA, 306 bp, Artificial Sequence
  Description of Artificial Sequence: Synthetic polynucleotide
atgaagaacgcagcattgtgtgaggctcttcctttactcgccacgtgctcccacgaaatcccacccacaccacacacggtctgtttcgtcttcccccccgcattattattatccccgagcaaactcacacttttgaattctcgtcgcgtcgcgtcccgctgcgtcattatcattgacccacgcttgttacgtctcttctcttgctccagaccacaacaactccccagagataaaaaccaatcttttgctaagccatctttttctttttttttctttcttcttaccagtttattatctcctttctga

SEQ ID NO: 11325 - DNA, 999 bp, Saccharomyces cerevisiae
atgagcggatacacgggaaataattatagcagatactcatccactcctccgagacaaagggggggttatcaccatgcgagacgaagtagaggtggagcaggcggatcgtattacagaggcggtaatgcgtcttatggcgcgagatacaacagtgactatgagcagccgccccaagagggagacttgagacaaaccggagcatactatcgaaacggatacacagatacaaggccgtactattcagctaatagcaggcattaccaagcacaaccatcccccaggtacaacaatggtacaaattcgtaccacctaccgcaacgtggcaatagtcaagatacgaacggcaggaccacgagcgcctcgcaagaagataatgacgaaaaaagagtcaagtccagataccggaacatgcaggcagatcatccacgccaacaaccgatgagcgttggcagcaccagcagcagaaatggtagtagtgggaacagcagcactagcagcaccagcaacgggcttccgccaccaccttcagtatcgtctataaccaacaatagatcatatcacagcagtgcttatccatattccagcagccatacttacaataattaccaccaccgtgagacaccaccgcctcccccatcgaatggctattatgcaaagggttacccagtacacgtaccagaaaatagaagtaacagcgacggctctagcagcagcgtcgtcaagaagaaaagaatactagatatgaaagattccccctttatttacttgacagattttgataaaaatgtgaaaaagacaaacaacaccgaaagtgaatgtgaaaaggcgagggaagttttcaaagagagcgattccatcgattccgctttggaagaactaaacctaaaaatcaattctaatgagctagaattgcggctcctaaataaccagtgcgacaagcatgcattaaatattcaactgacccaagaaaagctggactcattgttattaatgcagtag

SEQ ID NO: 11326 - DNA, 999 bp, Artificial Sequence
  Description of Artificial Sequence: Synthetic polynucleotide
atgagcggatacacgggaaataattatagcagatactcttccactcctccgagacaaagggggggttatcaccatgcgagaagaagtagaggtggagcaggcggatcctattacagaggcggtaatgcgtcttatggcgcgagatacaacagtgactatgagcagccgccccaagagggagacttgagacaaaccggagcatactatagaaacggatacacagatacaaggccgtactattctgctaatagcaggcattaccaagcacaaccatcccccaggtacaacaatggtacaaattcttaccacttaccgcaacgtggcaatagtcaagatacgaacggcaggaccacgagcgcctctcaagaagataatgacgaaaaaagagtcaagtccagatacagaaacatgcaggcagatcatccacgccaacaaccgatgagcgttggcagcaccagcagcagaaatggtagtagtgggaacagcagcactagcagcaccagcaacgggcttccgccaccaccttctgtatcttctataaccaacaatagatcttatcacagcagtgcttatccatattccagcagccatacttacaataattaccaccaccgtgagacaccaccgcctcccccatccaatggctattatgcaaagggttacccagtacacgtaccagaaaatagaagtaacagcgacggctctagcagcagcgtcgtcaagaagaaaagaatattggatatgaaagattccccctttatttacttgacagattttgataaaaatgtgaaaaagacaaacaacaccgaaagtgaatgtgaaaaggcgagggaagttttcaaagagagcgattccatcgattccgctttggaagaattgaacttgaaaatcaattctaatgagttagaattgaggctcttgaataaccagtgcgacaagcatgcattaaatattcaattgacccaagaaaagttggactctttgttattaatgcagtga

SEQ ID NO: 11327 - DNA, 906 bp, Saccharomyces cerevisiae
atggatgcttttgagaatatgtctgtatcaaatcatccgggcggtaacgcaagaagaaactcccaatcagcaaacgaaatgcttgcatcgcaaattcaggatttccagaatattccaaggtctttcaatgacagcaatgcaaatgtaaatttgtcaaaaaattgtactgtcggcaatcaactgcctttctcatcacgtcaacaaaaaattatcatggaacatttactgataacgaagaacaattctcaacagcagaaggactattcacacgtgccatgcaaattttttaagatgggcaattgccaagctggctcgtcttgtcccttttcccattccccagatattatcagttctgcgaataatttaccttgcaagtatttcgcaaagggtaactgtaaattcggtaacaagtgtgttaatgctcatgtgctgccaaatgggttcaagatgaacagtaaagaacctattgacatcactcccccttcacaaaacaactacttatcccatgctagatcagcttctttctctacctacacgtctcctcctctgtctgcacaaacggaattctctcactctgcttcgaatgcaaactacttttcctcgcaatacctaatgtattcgcctcagaaaagtccagaggccctatatactgaattcttttctcccccttcgtcttcttcttcgtacatcaactatagctataataactccaacattaatgcctattctccagtctcttcgtcttcatctaacatttggcaagagcaaggccaaactacgttatcgaatccgagtgtgaatcagaatttaaggtatcgtacaggccctgcaattcaagaagaatcagataatgaaattgaagatttacttattcacaatttcaattccagatactgtcatgaatga

SEQ ID NO: 11328 - DNA, 906 bp, Artificial Sequence
  Description of Artificial Sequence: Synthetic polynucleotide
atggatgcttttgagaatatgtctgtatctaatcatccgggcggtaacgcaagaagaaactcccaaagtgcaaacgaaatgcttgcatctcaaattcaggatttccagaatattccaaggtctttcaatgacagcaatgcaaatgtaaatttgagtaaaaattgtactgtcggcaatcaattacctttctcttctcgtcaacaaaaaattatcatggaacatttattgataacgaagaacaattctcaacagcagaaggactattctcacgtgccatgcaaattttttaagatgggcaattgccaagctggctcttcttgtcccttttcccattccccagatattatcagttctgcgaataatttaccttgcaagtatttcgcaaagggtaactgtaaattcggtaacaagtgtgttaatgctcatgtgttaccaaatgggttcaagatgaacagtaaagaacctattgacatcactcccccttctcaaaacaactacttatcccatgctagatctgcttctttctctacctacacgtctcctcctttatctgcacaaacggaattctctcactctgcttctaatgcaaactacttttcctctcaatacttgatgtattctcctcagaaaagtccagaggccttatatactgaattcttttctcccccttcttcttcttcttcctacatcaactatagctataataactccaacattaatgcctattctccagtctcttcttcttcttctaacatttggcaagagcaaggccaaactacgttatccaatccgagtgtgaatcagaatttaaggtatcgtacaggccctgcaattcaagaagaaagtgataatgaaattgaagatttacttattcacaatttcaattccagatactgtcatgaatga

SEQ ID NO: 11329 - DNA, 1341 bp, Saccharomyces cerevisiae
atgcacgtactgctgagcaaaaaaatagcacgctttctgttgatttcgtttgttttcgtgcttgcgctaatggtgacaataaatcatccaaaaacaaagcagatgtctgaacagtatgttacaccataccttccgaaatctttgcaacctattgcaaaaattagtgcagaggaacaaaggcgtatacaaagtgaacaggaagaagccgaattgaagcaatctttagagggagaggccattagaaatgccaccgtgaatgccattaaggaaaagatcaaatcttatggtggtaatgaaacgacgctagggttcatggtgccatcgtatatcaatcatagaggatcaccaccaaaggcgtgctttgtctcactaattactgaaagggattccatgacccaaatcttacaatctattgatgaagtgcaggtgaagtttaacaaaaattttgcttatccttgggtttttattagtcagggggagcttgacggaatgaagcaagaaatgattcgtcaagccataactgattctatgaatggtgatcctgagttaattaatattaaatttgctgaaattcctgcagacgaatgggtataccctgaatggattgatgaaaataaagcagcagaatcgctaatttcattagcaaatgtaccggatggtgattctagagctgtaagatatcaagctagatattttgcagggtttttttggaggcatccagttctggatgagtttgattggtactggagagtagaccctggtattaaattgtactgtgatattgatcatgacctttttaggtggatgcaagatgaaggcaaagtgtttggtttcacattgagtatgagtgaagctaaggaagccaatgagaagatttgggatgttacgaaaaaatttgcaaaggattttccaaagtttatttccgagaataatttcaagtcatttattacaaaaaaggactctgaagattttaacaactgtgaattcacatcaaattttgaaattggtaatttgaacttttatagatcgccagcttacaggaaattttttaattacatcgacgaagagggcggtattttctactggaaatggtctgattccatcatccacacaattgggttatcgatgctgttgccaaaggataaaatacattttttcgaaaatataggattccattatgacaagtacaataactgtcccctaaacgatgatatatggaaccaatataattgtaactgtgaccagggtaacgatttcacgtttagaagtggttcatgtggcggacattacttcgacattatgaagaaagataagccagaaggttgggataggttaccataa

SEQ ID NO: 11330 - DNA, 1341 bp, Artificial Sequence
  Description of Artificial Sequence: Synthetic polynucleotide
atgcacgtattgttgagcaaaaaaatagcacgctttttattgatttcctttgttttcgtgcttgcgttaatggtgacaataaatcatccaaaaacaaagcagatgtctgaacagtatgttacaccataccttccgaaatctttgcaacctattgcaaaaattagtgcagaggaacaaaggcgtatacaaagtgaacaggaagaagccgaattgaagcaatctttagagggagaggccattagaaatgccaccgtgaatgccattaaggaaaagatcaaatcttatggtggtaatgaaacgacgttggggttcatggtgccatcttatatcaatcatagaggatctccaccaaaggcgtgctttgtctctttgattactgaaagggattccatgacccaaatcttacaatctattgatgaagtgcaggtgaagtttaacaaaaattttgcttatccttgggtttttattagtcagggggagcttgacggaatgaagcaagaaatgattcgtcaagccataactgattctatgaatggtgatcctgagttaattaatattaaatttgctgaaattcctgcagacgaatgggtataccctgaatggattgatgaaaataaagcagcagaatctttgatttctttagcaaatgtaccggatggtgattctagagctgtaagatatcaagctagatattttgcagggtttttttggaggcatccagttttggatgagtttgattggtactggagagtagaccctggtattaaattgtactgtgatattgatcatgacctttttaggtggatgcaagatgaaggcaaagtgtttggtttcacattgagtatgagtgaagctaaggaagccaatgagaagatttgggatgttacgaaaaaatttgcaaaggattttccaaagtttatttccgagaataatttcaagagctttattacaaaaaaggactctgaagattttaacaactgtgaattcacaagtaattttgaaattggtaatttgaacttttatagatctccagcttacaggaaattttttaattacatcgacgaagagggcggtattttctactggaaatggtctgattccatcatccacacaattgggttatctatgcttttgccaaaggataaaatacattttttcgaaaatataggattccattatgacaagtacaataactgtcccttaaacgatgatatatggaaccaatataattgtaactgtgaccagggtaacgatttcacgtttagaagtggttcttgtggcggacattacttcgacattatgaagaaagataagccagaaggttgggataggttaccatga

SEQ ID NO: 11331 - DNA, 879 bp, Saccharomyces cerevisiae
atgtatgaagtaatacagaaaaggaaaacaaaaataataaacgttttacagagtcctgaactcatgaggctcatagaggacccatcaaatctgggtatttctttacattttccagtaagttcactgctaaaaagtaataagtgcacaccaatgcctaaactttctacgtatagtttggctagtgggggatttaaggattggtgcgcggacatccctctagacgttccaccagagattgatatcatcgatttttactgggatgttattttatgcatggaatctcaattcatattagattacaatgttccgtcaaaaaataaggggaacaatcagaagtctgttgctaagctgttgaaaaataagcttgtaaacgatatgaaaactacgttaaaaagactaatttataatgaaaataccaagcaatataaaaataataatagccacgatggttacaattggagaaaactaggctcgcagtatttcatactgtatcttcccctatttacgcaggaactgatttggtgtaaacttaatgaaaactatttccatgttgtattaccatctttactgaatagtaggaacgttcatgataaccacagtacctatataaataaagattggttacttgcccttttagagctaacttccaacctgaaccaaaacttcaaattcgaatacatgaaattgagattgtatattttaagagatgatttaattaataatggtttggatcttttgaaaaatcttaactgggtcggtgggaaactgattaaaaatgaagatagagaagtcttgttgaactcgaccgatttagctacggattctatttctcatttattaggtgatgaaaactttgttattttagagtttgaatgctaa

SEQ ID NO: 11332 - DNA, 879 bp, Artificial Sequence
  Description of Artificial Sequence: Synthetic polynucleotide
atgtatgaagtaatacagaaaaggaaaacaaaaataataaacgttttacagagtcctgaactcatgaggctcatagaggacccatccaatttgggtatttctttacattttccagtaagttctttattgaaaagtaataagtgcacaccaatgcctaaactttctacgtatagtttggctagtgggggatttaaggattggtgcgcggacatccctttggacgttccaccagagattgatatcatcgatttttactgggatgttattttatgcatggaatctcaattcatattagattacaatgttccgtccaaaaataaggggaacaatcagaagtctgttgctaagttgttgaaaaataagcttgtaaacgatatgaaaactacgttaaaaagattgatttataatgaaaataccaagcaatataaaaataataatagccacgatggttacaattggagaaaattgggctctcagtatttcatactttatcttcccttatttacgcaggaattgatttggtgtaaacttaatgaaaactatttccatgttgtattaccatctttattgaatagtaggaacgttcatgataaccacagtacctatataaataaagattggttacttgcccttttagagttaacttccaacttgaaccaaaacttcaaattcgaatacatgaaattgagattgtatattttaagagatgatttaattaataatggtttggatcttttgaaaaatcttaactgggtcggtgggaaattgattaaaaatgaagatagagaagtcttgttgaactctaccgatttagctacggattctatttctcatttattaggtgatgaaaactttgttattttagagtttgaatgctga

SEQ ID NO: 11333 - DNA, 597 bp, Saccharomyces cerevisiae
atgtttcatttagtcaagggactttacaataattggaataaaaaggaacaatattcaattctaatattaggtctagacaatgcaggcaaaacgacgttcttggagacattgaaaaaggaatactctctggcgttcaaagccttggaaaagatacagcctacggtaggacaaaatgtggcgacaatacccgttgacagtaaacagatcttgaagttttgggatgtaggtggtcaagaatcactgagatcaatgtggtccgaatactattccctatgtcatggtataattttcattgtggatagttcagatagagaacgattagacgaatgttccacgaccctacagtcagttgtaatggatgaagaaattgaaggtgtacccatcttgatgctggccaataaacaagatagacaagatagaatggaagtacaagatataaaagaagtatttaataagattgcggaacatataagcgctagagatagtagggttttaccaataagcgcattgactggagaaggtgttaaagacgctatagaatggatgattgttagactagaaaggaataaaaagtcaagaccaccgatttataaatga

SEQ ID NO: 11334 - DNA, 597 bp, Artificial Sequence
  Description of Artificial Sequence: Synthetic polynucleotide
atgtttcatttagtcaagggactttacaataattggaataaaaaggaacaatattctattttaatattaggtttggacaatgcaggcaaaacgacgttcttggagacattgaaaaaggaatactctttagcgttcaaagccttggaaaagatacagcctacggtaggacaaaatgtggcgacaatacccgttgacagtaaacagatcttgaagttttgggatgtaggtggtcaagaatctttgagaagtatgtggtccgaatactattccttatgtcatggtataattttcattgtggatagttctgatagagaaagattagacgaatgttccacgaccttgcagtctgttgtaatggatgaagaaattgaaggtgtacccatcttgatgttggccaataaacaagatagacaagatagaatggaagtacaagatataaaagaagtatttaataagattgcggaacatataagcgctagagatagtagggttttaccaataagcgcattgactggagaaggtgttaaagacgctatagaatggatgattgttagattagaaaggaataaaaagtctagaccaccgatttataaatga

SEQ ID NO: 11335 - DNA, 1188 bp, Saccharomyces cerevisiae
atgtcactttctcttgtatcgtaccgcctaagaaagaacccgtgggttaacatttttctacctgttttggccatatttctaatatatataatttttttccagagagatcaatctctgttgggacttaatggccagtccatttcccaacacaaatgggcacacgaaaaggaaaacacattttattttcccttcaccaagaaatacaaaatgccaaagtactcttataagaaaaaaagcggctggttgttcaacgatcacgtggaagatattatcccagaaggtcatattgcacattatgatttgaacaaattgcactctacgtcagaagcagctgtcaataaggagcatattttgatattgactccaatgcaaacatttcatcaacaatactgggacaatttgctgcagctaaattaccctcgggaattgattgaattggggttcattacaccaagaacagccactggtgacttggccttaaagaaattggagaatgctattaaaaaggttcaaacggacaagaaaactcaaagatttagtaaaattactattttgcgacagaattcccagagttttgataagttgatggagaaggaaagacacgctttagatgttcaaaaggaaagacgtgcagcaatggctttggcgcgcaatgaattactattctccaccataggacctcacacttcttgggtgctgtggctagatgccgatattatagagacaccaccatctttaattcaagacatgaccaaacacaacaaagctatcttagctgcaaacatttatcaaagattttacgatgaagagaagaagcaaccatcaatcagaccatacgatttcaacaactggcaagaaagtgacaccggtttagaaatagcctctcagatgggtgatgacgagattattgtcgagggttatgcagaaattgccacttataggccattaatggctcatttctacgatgctaatggcgtaccaggtgaagagatggcgctggatggtgttggtggaggctgtactttggtcaaagcagaagttcacagagacggtgccatgttccctaatttcccattttatcacttgattgaaacagaaggttttgctaagatggcgaagagattaaactacgatgtatttggcttaccaaactatttggtttatcacatagaggaagagaaccattga

SEQ ID NO: 11336 - DNA, 1188 bp, Artificial Sequence
  Description of Artificial Sequence: Synthetic polynucleotide
atgtctctttctcttgtatcttaccgcttgagaaagaacccgtgggttaacatttttttacctgttttggccatatttttaatatatataatttttttccagagagatcaatctttgttgggacttaatggccagtccatttcccaacacaaatgggcacacgaaaaggaaaacacattttattttcccttcaccaagaaatacaaaatgccaaagtactcttataagaaaaaaagcggctggttgttcaacgatcacgtggaagatattatcccagaaggtcatattgcacattatgatttgaacaaattgcactctacgagtgaagcagctgtcaataaggagcatattttgatattgactccaatgcaaacatttcatcaacaatactgggacaatttgttacagttgaattaccctagagaattgattgaattggggttcattacaccaagaacagccactggtgacttggccttaaagaaattggagaatgctattaaaaaggttcaaacggacaagaaaactcaaagatttagtaaaattactattttgagacagaattcccagagttttgataagttgatggagaaggaaagacacgctttagatgttcaaaaggaaagacgtgcagcaatggctttggcgcgcaatgaattattattctccaccataggacctcacacttcttgggtgttgtggcttgatgccgatattatagagacaccaccatctttaattcaagacatgaccaaacacaacaaagctatcttagctgcaaacatttatcaaagattttacgatgaagagaagaagcaaccatccatcagaccatacgatttcaacaactggcaagaaagtgacaccggtttagaaatagcctctcagatgggtgatgacgagattattgtcgagggttatgcagaaattgccacttataggccattaatggctcatttctacgatgctaatggcgtaccaggtgaagagatggcgttggatggtgttggtggaggctgtactttggtcaaagcagaagttcacagagacggtgccatgttccctaatttcccattttatcacttgattgaaacagaaggttttgctaagatggcgaagagattaaactacgatgtatttggcttaccaaactatttggtttatcacatagaggaagagaaccattga

SEQ ID NO: 11337 - DNA, 1359 bp, Saccharomyces cerevisiae
atggccgtatcagcccgtttgagaacgactgccgaggatacatccattgctaaatcaacacaagatccaattggtgatacagaaatcagtgtagcaaatgctaagggcagcagcgatagcaacattaagaattcgccaggcggaaacagcgttggtcaggagtcggagctagagcatgtccctgaggaggatgactctggtgacaaggaagcagatcatgaggattctgagacagccactgcgaagaagaggaaagcccaaccattgaagaatccgaagaaatcattgaagaggggcagagtcccggcgcctttgaatttatcggatagcaacactaatacacacggtggtaatattaaggacggcaacttggcttcgtctaactctgcacattttcctcctgttgctaatcaaaacgtgaaaagcgcgcccgcacaagttactcagcattccaagttccagccccgtgtccaatacttgggaaaggccagttctagacaatctatacaagtgaataatagcagcaatagttatgggaaaccacacatgccctcggcgggcatcatgagcgccatgaacccttacatgcccatgaatcgctacataatgtcaccatattataatccgtacggtatccctccacctcacatgctgaacaagcccataatgacaccctacgtgtcgtatccatatccaatgggaccgcggacctccattccttatgctatgcaaggtggcaacgctaggccctacgaagaaaatgagtatagtgctagcaattacagaaacaagagggttaacgactcatatgattcgcctttgagtggcaccgcttccactgggaaaaccagacgatccgaggaaggctcaagaaattctagcgtaggatcaagtgcgaatgccggtcctacgcaacagcgcgcggatctacgcccagcagatatgatacctgctgaagaataccactttgaacgggatgcattactctcggccaacacgaaagccagaagcgcaagcacaagcacaagtacaagcacaagcacaaaccgggacaggagttcatggcatgaggcagaacccaataaagacgaagaagagggtacggacttggccatcgaggacggagcggtccccactcccacttttactacgttccagcggacctcgcagccgcagcagcaatcacctagtcttcttcaaggcgaaatccgactctcatcgcatatttttgccttcgagttccccctgagctctagcaatgtagacaagaaaatgtttatgagcatatgtaataaagtatggaatgaatcaaaggagctgacaaaaaaatcatcatcacatcacagaaccggaaaatag

SEQ ID NO: 11338 - DNA, 1359 bp, Artificial Sequence
  Description of Artificial Sequence: Synthetic polynucleotide
atggccgtatctgcccgtttgagaacgactgccgaggatacatccattgctaaatctacacaagatccaattggtgatacagaaatcagtgtagcaaatgctaagggcagcagcgatagcaacattaagaattctccaggcggaaacagcgttggtcaggagagtgagttagagcatgtccctgaggaggatgactctggtgacaaggaagcagatcatgaggattctgagacagccactgcgaagaagaggaaagcccaaccattgaagaatccgaagaaatctttgaagaggggcagagtcccggcgcctttgaatttaagtgatagcaacactaatacacacggtggtaatattaaggacggcaacttggcttcttctaactctgcacattttcctcctgttgctaatcaaaacgtgaaaagcgcgcccgcacaagttactcagcattccaagttccagccccgtgtccaatacttgggaaaggccagttctagacaatctatacaagtgaataatagcagcaatagttatgggaaaccacacatgccctctgcgggcatcatgagcgccatgaacccttacatgcccatgaatcgctacataatgtctccatattataatccgtacggtatccctccacctcacatgttgaacaagcccataatgacaccctacgtgtcttatccatatccaatgggaccgaggacctccattccttatgctatgcaaggtggcaacgctaggccctacgaagaaaatgagtatagtgctagcaattacagaaacaagagggttaacgactcttatgattctcctttgagtggcaccgcttccactgggaaaaccagaagatccgaggaaggctccagaaattctagcgtaggaagtagtgcgaatgccggtcctacgcaacagcgcgcggatttacgcccagcagatatgatacctgctgaagaataccactttgaaagagatgcattactcagtgccaacacgaaagccagaagcgcaagcacaagcacaagtacaagcacaagcacaaacagagacaggagttcttggcatgaggcagaacccaataaagacgaagaagagggtacggacttggccatcgaggacggagcggtccccactcccacttttactacgttccagcgtacctctcagccgcagcagcaaagtcctagtcttcttcaaggcgaaatcaggctctcttctcatatttttgccttcgagttccccttaagctctagcaatgtagacaagaaaatgtttatgagcatatgtaataaagtatggaatgaatccaaggagttgacaaaaaaatcttcttctcatcacagaaccggaaaatga

SEQ ID NO: 11339 - DNA, 1248 bp, Saccharomyces cerevisiae
atgtctcaaggtactttatatgctaacttcagaattagaacttgggtcccaagaggtcttgtcaaggctttgaagctggacgttaaggttgttacgccagatgccgccgctgaacagttcgcaagggactttcccttgaagaaggttccggctttcgtgggtccaaagggttacaagctaaccgaggcaatggcgattaactattatttagtaaagctttcacaggacgacaagatgaagactcaacttttaggtgccgacgatgacttaaatgcccaagcgcaaatcatcagatggcaatctttggccaacagtgatctgtgcatccagattgccaacaccatcgttcccttgaagggcggcgccccctacaacaagaagagcgttgattctgcgatggacgctgttgacaagatcgtcgacatcttcgagaacagattgaaaaactacacctatttggctacggaaaacatctccttggccgacttggtggctgcctcgattttcaccagatactttgaaagcctgttcggtactgaatggagagctcaacatccagccatcgtgagatggttcaacaccgttagagcctcacccttcttgaaggatgaatacaaggatttcaagttcgctgacaagccattgagtccccctcaaaagaagaaggaaaagaaggccccagccgccgctcccgccgcttcgaagaagaaggaggaagccaagccagctgctaccgaaactgaaacttcttccaagaaaccaaagcacccattagaattattgggcaagtcaactttcgttttggatgactggaagagaaagtactccaatgaagacaccagaccagttgctttaccttggttttgggagcactacaacccagaagagtattccctgtggaaagtcacctacaagtacaacgatgaattgactttgactttcatgtccaacaacttggtcggtggtttcttcaacagattgtccgcctctaccaagtacatgttcggttgtctggtagtctacggtgaaaacaacaacaacggtattgttggtgcagttatggttaggggccaagattacgttccagctttcgatgtcgcaccagattgggaatcttacgactatgcaaagttggatccaactaacgacgacgacaaagaattcatcaataacatgtgggcctgggataagccagtttccgtcaatggcgaaccaaaggaaattgttgacggtaaggtcttaaaataa

SEQ ID NO: 11340 - DNA, 1248 bp, Artificial Sequence
  Description of Artificial Sequence: Synthetic polynucleotide
atgtctcaaggtactttatatgctaacttcagaattagaacttgggtcccaagaggtcttgtcaaggctttgaagttggacgttaaggttgttacgccagatgccgccgctgaacagttcgcaagggactttcccttgaagaaggttccggctttcgtgggtccaaagggttacaagttgaccgaggcaatggcgattaactattatttagtaaagctttctcaggacgacaagatgaagactcaacttttaggtgccgacgatgacttaaatgcccaagcgcaaatcatcagatggcaatctttggccaacagtgatttatgcatccagattgccaacaccatcgttcccttgaagggcggcgccccctacaacaagaagagcgttgattctgcgatggacgctgttgacaagatcgtcgacatcttcgagaacagattgaaaaactacacctatttggctacggaaaacatctccttggccgacttggtggctgcctctattttcaccagatactttgaaagcttattcggtactgaatggagagctcaacatccagccatcgtgagatggttcaacaccgttagagcctctcccttcttgaaggatgaatacaaggatttcaagttcgctgacaagccattgagtccccctcaaaagaagaaggaaaagaaggccccagccgccgctcccgccgcttccaagaagaaggaggaagccaagccagctgctaccgaaactgaaacttcttccaagaaaccaaagcacccattagaattattgggcaagtctactttcgttttggatgactggaagagaaagtactccaatgaagacaccagaccagttgctttaccttggttttgggagcactacaacccagaagagtattccttatggaaagtcacctacaagtacaacgatgaattgactttgactttcatgtccaacaacttggtcggtggtttcttcaacagattgtccgcctctaccaagtacatgttcggttgtttggtagtctacggtgaaaacaacaacaacggtattgttggtgcagttatggttaggggccaagattacgttccagctttcgatgtcgcaccagattgggaatcttacgactatgcaaagttggatccaactaacgacgacgacaaagaattcatcaataacatgtgggcctgggataagccagtttccgtcaatggcgaaccaaaggaaattgttgacggtaaggtcttaaaatga

SEQ ID NO: 11341 - DNA, 300 bp, Saccharomyces cerevisiae
atgaccgaagaaactattactatagattctatttcaaatgggatactgaataacctgttaaccacattgatccaggacattgtagctcgggaaaccactcaacaacaattgctgaagacaagatatccggatcttcgcagttattatttcgacccgaacggatctctcgatattaatggactacagaagcaacaagagtcctctcagtatattcactgtgagaattgtggcagggatgtgtccgcaaacagactagcagctcatttacagagatgtttgagtaggggtgctagacgttga

SEQ ID NO: 11342 - DNA, 300 bp, Artificial Sequence
  Description of Artificial Sequence: Synthetic polynucleotide
atgaccgaagaaactattactatagattctatttctaatgggatattgaataacttattaaccacattgatccaggacattgtagctagagaaaccactcaacaacaattgttgaagacaagatatccggatcttcgcagttattatttcgacccgaacggatctctcgatattaatggattacagaagcaacaagagtcctctcagtatattcactgtgagaattgtggcagggatgtgtccgcaaacagattagcagctcatttacagagatgtttgagtaggggtgctagacgttga

SEQ ID NO: 11343 - DNA, 300 bp, Saccharomyces cerevisiae
atgtctcaagatttcgttacgttagtatcaaaagatgataaggaatatgagatatcacgatctgctgcgatgatttcaccgacgttaaaagctatgattgagggacccttcagggaaagcaaaggccgaatagagctcaagcagtttgactcgcatattctagaaaaggctgtggaatatttaaattataatttgaagtacagcggcgttagcgaggacgatgatgagattccagagtttgaaataccgacagaaatgtcgttagagctgctacttgcggcggactatttgagtatatag

SEQ ID NO: 11344 - DNA, 300 bp, Artificial Sequence
  Description of Artificial Sequence: Synthetic polynucleotide
atgtctcaagatttcgttacgttagtatccaaagatgataaggaatatgagatatctcgttctgctgcgatgatttctccgacgttaaaagctatgattgagggacccttcagggaaagcaaaggcagaatagagctcaagcagtttgactctcatattttggaaaaggctgtggaatatttaaattataatttgaagtacagcggcgttagcgaggacgatgatgagattccagagtttgaaataccgacagaaatgtctttagagttattacttgcggcggactatttgagtatatga

SEQ ID NO: 11345 - DNA, 2397 bp, Saccharomyces cerevisiae
atgaaaaaccctagcttcgactgggaaagattgaaagacgtattttatagaagcagagccattggcgaattaaaatggccaactcagtacgaggagttcaaatgtgccttgtcattaactgttatcgcggttgaaattcaagactttatacaagtatacaattattttgggcagctgttaggcaagataaatttgcaaagaattcatgaggatataataaagtttgagttcgataaagacgagaagctgatattggtcacgaaaagctccatcaaaattgtgaaaggttggtcgccactgacgatagaaagtgtcccattacaggacccaaccattgatactatctgggactatcacaatggaatcatgttgttagcaaaatctcgtgatatatacaagttaaacggaaatgaatgggaacttctttacgagaacaaagataaaaaatataatttattgacaaaaaaccactggagttgcaatgatgactccatcattttactggatgttgatcatgtatatcaagtaagcacctcgaacggggcactattgaagttaatcacagattcgtcgtggcacaaggtaacgatctcatctagaggatttatttgcctttataatatgaaggacaataaactgcagattttcagagatccagcaagaatactaatggaacacaacttggattctacaccagatgatatatgttggtgtggcaatgataccgttgcttgttctttcgaggacgaaatcaaattatacggcccagatggtttgtatgtaacattttggtacccttttactgtaactaacctaagggcagaggttgatgggttgaaggttattaccactgaaaagatttactttctatccagggtacaacctcagacttctaatatatttagaattggctcaaccgagcctggtgcaatgcttgttgactcatttagtttactggaggatcatgcacccaaagcaattgaaatattaaagaattttgtcttagagaagggtgtactggactgtattgctgctgcaatagacgaatttgaacctaaactacagaagatgttgttgaacgctgcatcttatggaaaagcttctttgcagtacaagtcatttgacgctagtatatttgtgaatgcgtgtaatacgataaaattattaaactgcttcagaagttttggtatttttttgactgtggaggaatacaggtgtatttctttgaaaggtgtcattgataggctgttgaagtatcacagatattatgagtgcatacagatatgcaaattggccaatgaacgatttctgttaggatacgtgtttactgagtgggcaaaggataaaatcaagggtagtcctgacatggaagatgatgagttactagacaaaatcaaatctcgactaagtgttatagatatgacggatacattacaaatggtagcagttgcgaaagttgcatatcttgaaggaaggttccagttatcccgtaatttagctttattagagaaaaacgaagaagctagaattgagcaactgtataatcttgatgatgatagtatagcgctaaaggagtgtatcaaagtacaaaattacagtctgacaatttcattactgattgcactttccaaaaagctgacaaactctcaactgacgaagcttttgatcattgatatgttcaacaatcccttatatctctattatatgagaatggataaagcatacttgtacgatttttaccgccaaactgaccgatttattgacttggctcacgtattactgcagcagggaaaagaacagcaatctttacacagctttttaccgcaaattaaggacctttatagccaagttcaaaacagtgaagtggtcaacaatacaatagaacaacttcaaagacaggaaaagttgtggatataccaagaatcattaggcaaaagatttgctatatcattcactaatatgactttagatcaaacgctttcgaagttaatagaaacagggcaagataaacaggtgaaagaaatagttaaaaagttcaaaataagcgaaaaaaagctgtatcacctgaaatgtaaaacgttagtcgaagctaagaagtttgacgaactactacagtttgctcagtcgcggaaatcaccaattggttacatgcctttctacacatacttaaaaagcagaggccatatggataaagctagtccttatgttaatatgatacctggcctttcgtatcaggaaaagaaaaagctttatgtggagtgcaggggttttcgtgatgcaattcaactagcaggaaaggaaaaagacattccaggcttaaaggagatatataatattataccacctaatgagccggaattaaaggcattagcaaatgaaactatgagcaggatatag

SEQ ID NO: 11346 - DNA, 2397 bp, Artificial Sequence
  Description of Artificial Sequence: Synthetic polynucleotide
atgaaaaaccctagcttcgactgggaaagattgaaagacgtattttatagaagcagagccattggcgaattaaaatggccaactcagtacgaggagttcaaatgtgccttgtctttaactgttatcgcggttgaaattcaagactttatacaagtatacaattattttgggcagcttttaggcaagataaatttgcaaagaattcatgaggatataataaagtttgagttcgataaagacgagaagttaatattggtcacgaaaagctccatcaaaattgtgaaaggttggtctccattaacgatagaaagtgtcccattacaggacccaaccattgatactatctgggactatcacaatggaatcatgttgttagcaaaatctcgtgatatatacaagttaaacggaaatgaatgggaacttctttacgagaacaaagataaaaaatataatttattgacaaaaaaccactggagttgcaatgatgactccatcattttattagatgttgatcatgtatatcaagtaagcaccagtaacggggcattattgaagttaatcacagattcttcttggcacaaggtaacgatctcttctagaggatttatttgcctttataatatgaaggacaataaattacagattttcagagatccagcaagaatattaatggaacacaacttggattctacaccagatgatatatgttggtgtggcaatgataccgttgcttgttctttcgaggacgaaatcaaattatacggcccagatggtttgtatgtaacattttggtacccttttactgtaactaacttgagggcagaggttgatgggttgaaggttattaccactgaaaagatttactttctttccagggtacaacctcagacttctaatatatttagaattggctctaccgagcctggtgcaatgcttgttgactcttttagtttattggaggatcatgcacccaaagcaattgaaatattaaagaattttgtcttagagaagggtgtattggactgtattgctgctgcaatagacgaatttgaacctaaattacagaagatgttgttgaacgctgcatcttatggaaaagcttctttgcagtacaagagctttgacgctagtatatttgtgaatgcgtgtaatacgataaaattattaaactgcttcagaagttttggtatttttttgactgtggaggaatacaggtgtatttctttgaaaggtgtcattgataggttattgaagtatcacagatattatgagtgcatacagatatgcaaattggccaatgaaagatttttattaggatacgtgtttactgagtgggcaaaggataaaatcaagggtagtcctgacatggaagatgatgagttattagacaaaatcaaatctagattaagtgttatagatatgacggatacattacaaatggtagcagttgcgaaagttgcatatcttgaaggaaggttccagttatcccgtaatttagctttattagagaaaaacgaagaagctagaattgagcaattatataatcttgatgatgatagtatagcgttaaaggagtgtatcaaagtacaaaattacagtttgacaatttctttattgattgcactttccaaaaagttaacaaactctcaattaacgaagcttttgatcattgatatgttcaacaatcccttatatctctattatatgagaatggataaagcatacttgtacgatttttaccgccaaactgacagatttattgacttggctcacgtattattgcagcagggaaaagaacagcaatctttacacagctttttaccgcaaattaaggacctttatagccaagttcaaaacagtgaagtggtcaacaatacaatagaacaacttcaaagacaggaaaagttgtggatataccaagaatctttaggcaaaagatttgctatatctttcactaatatgactttagatcaaacgctttccaagttaatagaaacagggcaagataaacaggtgaaagaaatagttaaaaagttcaaaataagcgaaaaaaagctttatcacttgaaatgtaaaacgttagtcgaagctaagaagtttgacgaattattgcagtttgctcagtctagaaaatctccaattggttacatgcctttctacacatacttaaaaagcagaggccatatggataaagctagtccttatgttaatatgatacctggcctttcctatcaggaaaagaaaaagctttatgtggagtgcaggggttttcgtgatgcaattcaattggcaggaaaggaaaaagacattccaggcttaaaggagatatataatattataccacctaatgagccggaattaaaggcattagcaaatgaaactatgagcaggatatga

SEQ ID NO: 11347 - DNA, 2058 bp, Saccharomyces cerevisiae
atggaagaaacaatagaaaatgttgaagtgccttctagtaatgtctcaaaacaaaatgacgacggcctagatatgaagactttgtttgtgaggtctataccccaggatgtcacagatgagcagctggcagatttcttttccaattttgctccgatcaagcatgcggtagttgttaaggacacgaataaaaggtccaggggcttcgggttcgttagttttgctgtagaggatgacacaaaagaagccctagctaaggccagaaagaccaaatttaacggacatatcttgagggtagacattgctaaaagaagagatcgttcaaagaaaacatcagaagtggttgaaaagagcacacctgagtcatctgagaaaataacgggccagaacaatgaagatgaggacgatgctgatggtgaagactccatgctaaaaggtaaaccgaaattaattatcagaaatatgccatggagttgtcgtgatccagttaaattgaaaaagatctttggtagatatggtaccgtcgtggaggctaccattccaaggaagcgtgatggtaaattgtgtggatttgcgtttgttactatgaagaaaatcagtaattgtagaattgctttggaaaacaccaaagacttgaaaattgatggtagaaaggtggctgttgattttgctgttcaaaaaaacagatgggaagattacaaaaaagcccagccagaaatgaatgacaaagatgataacgagtcaggaaatgaagatgctgaagaaaaccatgacgacgaagaagatgaaaatgaagaggaagatagacaagtagatcaagcttcaaaaaacaaagaatcgaaacgtaaagcacaaaacaaaagggaagatttttctgtttttgttcgtaacgtcccttatgatgccactgaagaatctttggctccgcacttcagtaaatttggcagcgttaaatacgcattacctgttatcgataagtctacggggttggctaaaggtacggcctttgtagccttcaaagaccaatatacatataacgagtgtatcaaaaatgcgcctgcggctggctctacctctttattgataggtgatgatgtcatgcctgagtatgtgtatgaaggtcgtgttctgtccattactccaacgttagtaagagaggatgctggaagaatggcagaaaagaacgccgccaaaagaaaggaggccctaggtaaagcgccaggcgaaaaagatagacgtaacttatatttgctgaatgaaggtagagttgttgaaggctcaaaaatggctgatttgttaaccaacactgacatggagatcagagaaaaatcttacaaattaagagtggagcaactgaaaaagaacccatctttgcatttgtcgatgactaggttggctatcagaaatcttcctagagcaatgaatgataaagcattaaaggcgttagctcgtaaagctgtcgtggaatttgctacagaagttaaaaataaggaaagacatccattgagtaaagaagagattatcagatctacaaaggaaaaatacaagttcatgggtccagatgagattgaagctcaaaaaaagaaagacaaaaaaagtggtgttgtcaagcaagcaaaagttataatggaagttaaaggatcaactgcgggaagaagtagaggttacggttttgtagaattcagagatcataaaaacgctttgatgggcttaaggtggttgaattgtcatgccgttacctccgatgaaattttagagggtttgaatgatgatgaaaagaaacaagtagacaatgacttaggcaaaggaagacgtctttgtgttgaatttgcgattgagaactctaacgtcgtaaagagaagaagggaacaattgaagcaagcaagaaccaagagaacaagaccagataatgaagatactggagatgtcggagaatccgagaataagaagccaaaaaaagaagaagcaacgacgcccaccaatcccgatgacaaaaagatgggcgatgatataaagagaataatcgggttcaagcgtaagagaaagcacgcaaaaaaatag

SEQ ID NO: 11348 - DNA, 2058 bp, Artificial Sequence
  Description of Artificial Sequence: Synthetic polynucleotide
atggaagaaacaatagaaaatgttgaagtgccttctagtaatgtctccaaacaaaatgacgacggcttggatatgaagactttgtttgtgaggtctataccccaggatgtcacagatgagcagttagcagatttcttttccaattttgctccgatcaagcatgcggtagttgttaaggacacgaataaaaggtccaggggcttcgggttcgttagttttgctgtagaggatgacacaaaagaagccttagctaaggccagaaagaccaaatttaacggacatatcttgagggtagacattgctaaaagaagagatcgttccaagaaaacaagtgaagtggttgaaaagagcacacctgagtcttctgagaaaataacgggccagaacaatgaagatgaggacgatgctgatggtgaagactccatgttgaaaggtaaaccgaaattaattatcagaaatatgccatggagttgtcgtgatccagttaaattgaaaaagatctttggtagatatggtaccgtcgtggaggctaccattccaaggaagcgtgatggtaaattgtgtggatttgcgtttgttactatgaagaaaatcagtaattgtagaattgctttggaaaacaccaaagacttgaaaattgatggtagaaaggtggctgttgattttgctgttcaaaaaaacagatgggaagattacaaaaaagcccagccagaaatgaatgacaaagatgataacgagagtggaaatgaagatgctgaagaaaaccatgacgacgaagaagatgaaaatgaagaggaagatagacaagtagatcaagcttccaaaaacaaagaaagtaaacgtaaagcacaaaacaaaagggaagatttttctgtttttgttcgtaacgtcccttatgatgccactgaagaatctttggctccgcacttcagtaaatttggcagcgttaaatacgcattacctgttatcgataagtctacggggttggctaaaggtacggcctttgtagccttcaaagaccaatatacatataacgagtgtatcaaaaatgcgcctgcggctggctctacctctttattgataggtgatgatgtcatgcctgagtatgtgtatgaaggtcgtgttttatccattactccaacgttagtaagagaggatgctggaagaatggcagaaaagaacgccgccaaaagaaaggaggcccttggtaaagcgccaggcgaaaaagatagacgtaacttatatttgttgaatgaaggtagagttgttgaaggctctaaaatggctgatttgttaaccaacactgacatggagatcagagaaaaatcttacaaattaagagtggagcaattgaaaaagaacccatctttgcatttgtccatgactaggttggctatcagaaatcttcctagagcaatgaatgataaagcattaaaggcgttagctcgtaaagctgtcgtggaatttgctacagaagttaaaaataaggaaagacatccattgagtaaagaagagattatcagatctacaaaggaaaaatacaagttcatgggtccagatgagattgaagctcaaaaaaagaaagacaaaaaaagtggtgttgtcaagcaagcaaaagttataatggaagttaaaggatctactgcgggaagaagtagaggttacggttttgtagaattcagagatcataaaaacgctttgatgggcttaaggtggttgaattgtcatgccgttacctccgatgaaattttagagggtttgaatgatgatgaaaagaaacaagtagacaatgacttaggcaaaggaagacgtctttgtgttgaatttgcgattgagaactctaacgtcgtaaagagaagaagggaacaattgaagcaagcaagaaccaagagaacaagaccagataatgaagatactggagatgtcggagaatccgagaataagaagccaaaaaaagaagaagcaacgacgcccaccaatcccgatgacaaaaagatgggcgatgatataaagagaataatcgggttcaagcgtaagagaaagcacgcaaaaaaatga

SEQ ID NO: 11349 - DNA, 1668 bp, Saccharomyces cerevisiae
atgtataatggcaaggatagagcacaaaactcctatcagccaatgtaccaaaggcctatgcaggtacaaggacaacagcaagctcaatcgttcgttggaaagaaaaacacaatcggaagtgtgcatggaaaagccccgatgctaatggccaataatgatgtttttactattggaccttatagggcaagaaaagatagaatgcgggtatctgtcttagaaaagtacgaagttattggctacattgctgcgggcacatatggtaaagtttacaaagcgaaaagacaaatcaactccggtaccaattccgctaatggttctagtctgaatggtaccaatgcgaaaattccgcagtttgacagcacgcaaccaaaatcaagctcttcaatggacatgcaggcaaatacaaacgcattaagaagaaacttgttaaaggatgaaggagtgacccccggaagaatacgaactacgagggaagatgtatccccgcactataattcccaaaaacaaaccctcattaaaaaaccgctgacggtattttatgccattaaaaagttcaagacagagaaggatggcgtcgaacaattgcattatacgggaatatctcagagtgcctgtagagaaatggcattatgtcgagaattgcacaacaagcatttaaccacattagtggaaatttttttggaaaggaaatgtgtccatatggtatacgaatatgcggagcatgatctgctacaaattatccacttccattcccatcccgaaaaaaggatgataccaccaagaatggttcggtctattatgtggcagcttttagacggcgtatcgtatcttcatcaaaattgggtgcttcatcgagatttgaaacccgcaaatataatggtgaccatagatggatgtgttaaaattggtgatttaggtttggccagaaaatttcataatatgctgcaaaccctctatactggggataaagtggttgtcactatatggtaccgtgcacctgagttgctattgggagcacggcactatacccctgcggttgatttatggtccgttggctgcatttttgcagaactgataggattacagcccatatttaaaggtgaagaagctaaactagactctaaaaagactgttccatttcaagtgaatcaactacagagaattttggaagttcttggcactcccgatcaaaaaatttggccttatttggagaagtatccagaatatgatcaaattacgaagtttccaaagtatagggataaccttgctacatggtatcattccgcgggaggaagggacaagcatgctttaagcttactttaccacttgttaaattatgatccaattaaaagaatagatgcatttaatgcgttggaacataagtacttcacagaaagtgatattcctgttagtgaaaatgtatttgaaggtctaacttacaaatacccggcaagaagaattcacacgaacgataatgacatcatgaatcttggatcaagaacgaaaaacaatacacaagcttcaggaatcaccgcaggtgccgctgcaaatgcgttaggtgggcttggtgttaaccgtagaattctggccgcggcagcagcagccgctgctgcggtgtcaggaaacaatgcatcagatgagccatctcgaaagaaaaacagaagatag

SEQ ID NO: 11350 - DNA, 1668 bp, Artificial Sequence
  Description of Artificial Sequence: Synthetic polynucleotide
atgtataatggcaaggatagagcacaaaactcctatcagccaatgtaccaaaggcctatgcaggtacaaggacaacagcaagctcaaagtttcgttggaaagaaaaacacaatcggaagtgtgcatggaaaagccccgatgttaatggccaataatgatgtttttactattggaccttatagggcaagaaaagatagaatgagagtatctgtcttagaaaagtacgaagttattggctacattgctgcgggcacatatggtaaagtttacaaagcgaaaagacaaatcaactccggtaccaattccgctaatggttctagtttgaatggtaccaatgcgaaaattccgcagtttgacagcacgcaaccaaaaagtagctcttctatggacatgcaggcaaatacaaacgcattaagaagaaacttgttaaaggatgaaggagtgacccccggaagaataagaactacgagggaagatgtatccccgcactataattcccaaaaacaaaccctcattaaaaaaccgttaacggtattttatgccattaaaaagttcaagacagagaaggatggcgtcgaacaattgcattatacgggaatatctcagagtgcctgtagagaaatggcattatgtagagaattgcacaacaagcatttaaccacattagtggaaatttttttggaaaggaaatgtgtccatatggtatacgaatatgcggagcatgatttattacaaattatccacttccattcccatcccgaaaaaaggatgataccaccaagaatggttagatctattatgtggcagcttttagacggcgtatcttatcttcatcaaaattgggtgcttcatagagatttgaaacccgcaaatataatggtgaccatagatggatgtgttaaaattggtgatttaggtttggccagaaaatttcataatatgttacaaaccctctatactggggataaagtggttgtcactatatggtaccgtgcacctgagttgttgttgggagcaagacactatacccctgcggttgatttatggtccgttggctgcatttttgcagaattgataggattacagcccatatttaaaggtgaagaagctaaattagactctaaaaagactgttccatttcaagtgaatcaattgcagagaattttggaagttcttggcactcccgatcaaaaaatttggccttatttggagaagtatccagaatatgatcaaattacgaagtttccaaagtatagggataaccttgctacatggtatcattccgcgggaggaagggacaagcatgctttaagcttactttaccacttgttaaattatgatccaattaaaagaatagatgcatttaatgcgttggaacataagtacttcacagaaagtgatattcctgttagtgaaaatgtatttgaaggtttgacttacaaatacccggcaagaagaattcacacgaacgataatgacatcatgaatcttggaagcagaacgaaaaacaatacacaagcttctggaatcaccgcaggtgccgctgcaaatgcgttaggtgggcttggtgttaaccgtagaattttagccgcggcagcagcagccgctgctgcggtgtctggaaacaatgcatctgatgagccatctagaaagaaaaacagaagatga

SEQ ID NO: 11351 - DNA, 624 bp, Saccharomyces cerevisiae
atgactgtcatgaatcttttcttcaggccctgtcaactgcagatgggctctggaccgttggagctcatgcttaaaaggccaacgcaattgaccacgtttatgaacaccaggcccggcggatcaacccaaattagattcatatcgggaaatttagatccagtgaaaagaagggaggatagactacgtaaaatattttccaagtcacgacttttaacaaggttaaacaagaatcctaaattttcacactatttcgaccgcctcagtgaggccggcacggttccaacacttacatcattcttcatcttgcatgaggtaactgccatactaccactgtttctactatggtggttactttataacctcgatctttctgatgattttaagctcccaaacttcttaaatggcctaatggatagctgtcatacagctatggagaaatttgttggtaagagatatcaggaatgcctcaacaaaaacaagttgattttatctggcacagtagcctacgttacagtaaaattactatatccggtacgcattttcattagtatctggggagcaccatattttgggaaatggttgcttcttccctttcaaaaattaaagcaccttattaagaaataa

SEQ ID NO: 11352 - DNA, 624 bp, Artificial Sequence
  Description of Artificial Sequence: Synthetic polynucleotide
atgactgtcatgaatcttttcttcaggccctgtcaattgcagatgggctctggaccgttggagctcatgcttaaaaggccaacgcaattgaccacgtttatgaacaccaggcccggcggatctacccaaattagattcatatctggaaatttagatccagtgaaaagaagggaggatagattacgtaaaatattttccaagtctaggcttttaacaaggttaaacaagaatcctaaattttctcactatttcgaccgcctcagtgaggccggcacggttccaacacttacatctttcttcatcttgcatgaggtaactgccatattgccattatttttattatggtggttactttataacctcgatctttctgatgattttaagctcccaaacttcttaaatggcttaatggatagctgtcatacagctatggagaaatttgttggtaagagatatcaggaatgcctcaacaaaaacaagttgattttatctggcacagtagcctacgttacagtaaaattattatatccggtacgcattttcattagtatctggggagcaccatattttgggaaatggttgcttcttccctttcaaaaattaaagcaccttattaagaaatga

SEQ ID NO: 11353 - DNA, 3009 bp, Saccharomyces cerevisiae
atgaagcgctccaggcttgtgcctcaacatatctttagcattattagcaagcgatatctcgccaaacatgcctaccaaaaaacattaaacttgcccaagaccaaattccctaatagatcaaacttagagattacattgagggaattaataccaaaatcttcgcagttagtttacaaggagcagctacgtgatttcttcgaagaattttcaaagcttaatacgactgatgaaaaattagagttcattaaagaaaagttgttcatcttacatgatggaccgccctatgccaacggcgagctccatctcggtcatgctctaaataaaattctgaaagatatcataaacagatatcaactttcacaggggaagtacattttttataagcctggctgggattgtcatggactacccatcgagattaaagctttgaaagatttaagcgcgcaacagatcgagtcaatatcgcctttaaaaatcaggtcaatggctttaaaacatgcacaaaaggcaatcaagaggcaaagggaaactttccaacattttgccatcttaacggactgggaaacaccatacctaacaatggataaagactatgaaattaatcagctaaatatttttaaagaaatgtacgaaagaggactgattaagagacagaacaaaccggtttactggggtacagaaactagaacagcgttagcagagggcgaattagaatataatgaaaaccataaatccatcgctgcttatgttaaatttcctcttgaaaagaaatcccagatggatctgtgcaaaaaactaggaataacgaataacttgcctatatactgtttgatttggaccagtactccatggactcttctctctaatcgagcaatctgtttcaatcaggatttttcctactccctattacgcttaaatagtgaacttatccttgtagagaccggctccattgataaattgggcctaacaactaactcatttgagactatcaaacagtttcaaggaactcatctaaatgggctatattatcaaaacctcttagtagacgataaggttggcaggcccttattacatggtgcacacgttaccagcggtacagggactggattggttcatacagcaccagggcatggacaggatgactatctcattggtattcaaaatggtcttgaaatttattctcccgtggatcaccagggccgctaccaattaaatgaacttcctcagtccgtcagatccatcgtgagagatgaaggagacttaacaaaaggtaggcaagtattggatgccgaaaccgcgaaaatcattctatgtaagttaagcgaccttaatttactttacaaatctcacgaatacacgcattcttatccgtacgactggagatccaagaaacctgtcataataagagctactccacagtggtttgcagatttacacgatgtaaaaaacttggctctggaaagcatcagccgcgtcaagttttgtcctaaaagaggctattcaagactttcatcctttatgaaaagcagaaatgaatggtgcatatctaggcaacgctcatggggtatccctatattaagcttttacaagaagagcgaaccggattctgttttgatgaattcagaaattttggcacatgccatagaaaaaatcaaacaaaaaggaattaatgcatggtttaacgataaagataatgacatgaaagaatggttgccagaaaaatatcacgacgtagcgcatgaatactgtcgttctcaagatactatggatgtgtggtttgatagtgggtcgtcatggagtgtgatcaaagacttttatgaaaaaagcttaaagttgtcaaaactcccatcccccctgtaccaagtttgtctagaaggatctgatcaacatagaggatggtttcaaagttcactgctaacaaaagtagcatcaagtaatgtccctgttgcaccatatgaagaagtgattactcatggttttaccctagatgagaatggtctgaaaatgtcaaaatctgtgggaaatacaatttctcccgaagcaataattcgaggcgatgaaaacttaggcttaccagctttgggtgttgatggcttgaggtatctgatagcacaatcgaatttcacaactgatatagttgctggcccgactgtgatgaaacatgtaggagaagctctaaaaaaggttagactaacttttcgctatttattgagtaatttacagaagtcccaagatttcaaccttttgccgattgaacaattacgccgtgttgatcaatataccttgtataagataaacgaactgctggaaacgacgagagaacactaccaaaagtacaacttttccaaggttctcattactctacaatatcatttaaataacgagctatcggcgttttattttgatatctcaaaggatattttatattccaaccaaatatcgtcattggcaagaaggcaggtccaaacaacgcttgtccatatactaaatgcatatagggcaattcttgcaccaatattacccgttatggtccaagaagtatggaagtatataccagaaggatggttacaaggacaagaacatatagacattaatccgatgcgtggaaaatggccgtttttggactcaaatacggaaatcgtcacctcctttgaaaactttgaactaaaaattctaaaacagttccaggaggaattcaagaggttaagtctagaagaaggtgtcaccaaaacaacacatagtcacgttaccattttcaccaagcatcacctcccattcagttctgacgagctttgcgacatattgcaatcatctgctgttgatatattgcaaatggacgataataataacagtctaccaactattgaattgggaagcggaataaacgttcaaatattggttgaacgaagcaaaaggcacaactgtcccagatgttggaaggccaactcagccgaagaggataaattgtgtgacagatgtaaagaagctgtggatcatctcatgtcttga

SEQ ID NO: 11354 - DNA, 3009 bp, Artificial Sequence
  Description of Artificial Sequence: Synthetic polynucleotide
atgaagcgctccaggcttgtgcctcaacatatctttagcattattagcaagagatatctcgccaaacatgcctaccaaaaaacattaaacttgcccaagaccaaattccctaatagatctaacttagagattacattgagggaattaataccaaaatcttctcagttagtttacaaggagcagttgcgtgatttcttcgaagaattttccaagcttaatacgactgatgaaaaattagagttcattaaagaaaagttgttcatcttacatgatggaccgccctatgccaacggcgagctccatctcggtcatgctttgaataaaattttgaaagatatcataaacagatatcaactttctcaggggaagtacattttttataagcctggctgggattgtcatggattgcccatcgagattaaagctttgaaagatttaagcgcgcaacagatcgagagtatatctcctttaaaaatcaggtctatggctttaaaacatgcacaaaaggcaatcaagaggcaaagggaaactttccaacattttgccatcttaacggactgggaaacaccatacttgacaatggataaagactatgaaattaatcagttgaatatttttaaagaaatgtacgaaagaggattgattaagagacagaacaaaccggtttactggggtacagaaactagaacagcgttagcagagggcgaattagaatataatgaaaaccataaatccatcgctgcttatgttaaatttcctcttgaaaagaaatcccagatggatttatgcaaaaaattaggaataacgaataacttgcctatatactgtttgatttggaccagtactccatggactcttctctctaatagagcaatctgtttcaatcaggatttttcctactccttattacgcttaaatagtgaacttatccttgtagagaccggctccattgataaattgggcttaacaactaactcttttgagactatcaaacagtttcaaggaactcatttgaatgggttatattatcaaaacctcttagtagacgataaggttggcaggcccttattacatggtgcacacgttaccagcggtacagggactggattggttcatacagcaccagggcatggacaggatgactatctcattggtattcaaaatggtcttgaaatttattctcccgtggatcaccagggccgctaccaattaaatgaacttcctcagtccgtcagatccatcgtgagagatgaaggagacttaacaaaaggtaggcaagtattggatgccgaaaccgcgaaaatcattctttgtaagttaagcgaccttaatttactttacaaatctcacgaatacacgcattcttatccgtacgactggagatccaagaaacctgtcataataagagctactccacagtggtttgcagatttacacgatgtaaaaaacttggctttggaaagcatcagccgcgtcaagttttgtcctaaaagaggctattctagactttcctcctttatgaaaagcagaaatgaatggtgcatatctaggcaacgcagttggggtatccctatattaagcttttacaagaagagcgaaccggattctgttttgatgaattctgaaattttggcacatgccatagaaaaaatcaaacaaaaaggaattaatgcatggtttaacgataaagataatgacatgaaagaatggttgccagaaaaatatcacgacgtagcgcatgaatactgtcgttctcaagatactatggatgtgtggtttgatagtgggtcttcttggagtgtgatcaaagacttttatgaaaaaagcttaaagttgagtaaactcccatcccccttgtaccaagtttgtttagaaggatctgatcaacatagaggatggtttcaaagttctttattaacaaaagtagcaagtagtaatgtccctgttgcaccatatgaagaagtgattactcatggttttaccttggatgagaatggtttgaaaatgtccaaatctgtgggaaatacaatttctcccgaagcaataattagaggcgatgaaaacttaggcttaccagctttgggtgttgatggcttgaggtatttgatagcacaaagcaatttcacaactgatatagttgctggcccgactgtgatgaaacatgtaggagaagctttgaaaaaggttagattaacttttcgctatttattgagtaatttacagaagtcccaagatttcaaccttttgccgattgaacaattacgccgtgttgatcaatataccttgtataagataaacgaattattggaaacgacgagagaacactaccaaaagtacaacttttccaaggttctcattactttacaatatcatttaaataacgagttatctgcgttttattttgatatctccaaggatattttatattccaaccaaatatcttctttggcaagaaggcaggtccaaacaacgcttgtccatatattgaatgcatatagggcaattcttgcaccaatattacccgttatggtccaagaagtatggaagtatataccagaaggatggttacaaggacaagaacatatagacattaatccgatgcgtggaaaatggccgtttttggactctaatacggaaatcgtcacctcctttgaaaactttgaattgaaaattttgaaacagttccaggaggaattcaagaggttaagtttagaagaaggtgtcaccaaaacaacacatagtcacgttaccattttcaccaagcatcacctcccattcagttctgacgagctttgcgacatattgcaatcttctgctgttgatatattgcaaatggacgataataataacagtttaccaactattgaattgggaagcggaataaacgttcaaatattggttgaaagaagcaaaaggcacaactgtcccagatgttggaaggccaactctgccgaagaggataaattgtgtgacagatgtaaagaagctgtggatcatctcatgtcttga

SEQ ID NO: 11355 - DNA, 951 bp, Saccharomyces cerevisiae
atgctgaaagaggagtataatttgagcggtgctgataacatggcatctgctgagttgtcatttaaaaagcaaaaagtggtattgaaaaagttcatgatagcgcaagtgactaaggggattatgcagcggtatgcgagcctattagttaccatgcctagtgatgatgacaatgcaattattggcacaaatcatttgaaaacaaccaaatttttagaaataatcctacacagagccaaatcatcgcatttacagttcaaaaaggtctgttgcattgtcatcaagtttctagattgctgctcgaaggaaactaactacatgaagtttttaaagttcagcttacacaaactatttgtagctgctttcatcttaagtgtgccaaatgttgtaggcgatgaccgcgacaggattaccacgagggatgaaacctatcatctctattcccagataacaggcttgccactggaagaagtgataaattgttgttctattgtgaggcctgtacttattcggcggagtagacaacaacgcaggcaaatgttatctcgacgtgaacaacattcgtacttcctcagaagttcttttatgaactccaattcatcagcatcaccttttttctctaccaataggtcagctgatgatctacatgtacatacaagggcatactcgcttcatagccattccgatggggaaggccaagataggcggtcggaacatgaagaaacgcatagcatgggggctgatgccgatacatatcgacaaactacgtttatcccagacacaccaaatggtttgcattctagatcattaattgagtgtgggatcgaacccacccaagtaagtgactctggtgaatggtcgggtcaaagtaacggatatgttttggtgacagaattacaggagtttaacaaaatgggtaaaaagttagtacaagaagcttttaggatagtttaa

SEQ ID NO: 11356 - DNA, 951 bp, Artificial Sequence
  Description of Artificial Sequence: Synthetic polynucleotide
atgttgaaagaggagtataatttgagcggtgctgataacatggcatctgctgagttgagttttaaaaagcaaaaagtggtattgaaaaagttcatgatagcgcaagtgactaaggggattatgcagagatatgcgagcttattagttaccatgcctagtgatgatgacaatgcaattattggcacaaatcatttgaaaacaaccaaatttttagaaataatcttgcacagagccaaaagctctcatttacagttcaaaaaggtctgttgcattgtcatcaagtttttggattgctgctctaaggaaactaactacatgaagtttttaaagttcagcttacacaaattatttgtagctgctttcatcttaagtgtgccaaatgttgtaggcgatgaccgcgacaggattaccacgagggatgaaacctatcatctctattcccagataacaggcttgccattggaagaagtgataaattgttgttctattgtgaggcctgtacttattagaagaagtagacaacaacgcaggcaaatgttatctcgtcgtgaacaacattcttacttcctcagaagttcttttatgaactccaattcttctgcatctccttttttctctaccaataggtctgctgatgatttgcatgtacatacaagggcatactctcttcatagccattccgatggggaaggccaagataggagaagtgaacatgaagaaacgcatagcatgggggctgatgccgatacatatagacaaactacgtttatcccagacacaccaaatggtttgcattctagatctttaattgagtgtgggatcgaacccacccaagtaagtgactctggtgaatggtctggtcaaagtaacggatatgttttggtgacagaattacaggagtttaacaaaatgggtaaaaagttagtacaagaagcttttaggatagtttga

SEQ ID NO: 11357 - DNA, 192 bp, Saccharomyces cerevisiae
atggtttgtcgttttgttcatcattcaagggtcatttttatttccatttatgatttcttgagtacaaaaggcaaaaaaaacatgtataattatacacaagaaaaaaaaacaaaacaaaagaacactttcacacaagcaagtatatattatgagaattttttcgagtcttacagaaccatatcttgcctctaa

SEQ ID NO: 11358 - DNA, 192 bp, Artificial Sequence
  Description of Artificial Sequence: Synthetic polynucleotide
atggtttgtcgttttgttcatcattccagggtcatttttatttccatttatgatttcttgagtacaaaaggcaaaaaaaacatgtataattatacacaagaaaaaaaaacaaaacaaaagaacactttcacacaagcaagtatatattatgagaattttttcgagtcttacagaaccatatcttgcctctga

SEQ ID NO: 11359 - DNA, 534 bp, Saccharomyces cerevisiae
atgaaactggcgcaagacatgaatgtagatgaaatatttctcaaacaagcggcagaagctatagcggtaatctcatcaagtcccactcatacggaccccataatacgagagctactccacagaattcgacaatccagcccattgagcgcagttataccagcaccagaaaatgttttaaaggctggggagccggaaaatatggctagaggtcttataaggattccagaaacacaaacaaaaagaacaggaggtaacaaccatagcaaggaaggcgcacagctctacagctgtgcgaaatgtcagttgaaattcagcagaagttctgatctgagaagacatgaaaaggtacactcactcgtgctgccgcatatttgctcaaactgtggcaaagggtttgccaggaaggatgctctaaaaagacattctaacacactgacctgtcaaagaaacagaaagaaactaagtgaaggttcagacgttgatgtagatgagctcatcaaggatgcgataaagaatggtaccggcctgttgtaa

SEQ ID NO: 11360 - DNA, 534 bp, Artificial Sequence
  Description of Artificial Sequence: Synthetic polynucleotide
atgaaattagcgcaagacatgaatgtagatgaaatatttctcaaacaagcggcagaagctatagcggtaatctcttccagtcccactcatacggaccccataataagagagttactccacagaattagacaatccagcccattgagcgcagttataccagcaccagaaaatgttttaaaggctggggagccggaaaatatggctagaggtcttataaggattccagaaacacaaacaaaaagaacaggaggtaacaaccatagcaaggaaggcgcacagctctacagctgtgcgaaatgtcagttgaaattcagcagaagttctgatttgagaagacatgaaaaggtacacagtctcgtgttgccgcatatttgcagcaactgtggcaaagggtttgccaggaaggatgctttgaaaagacattctaacacattaacctgtcaaagaaacagaaagaaattaagtgaaggttctgacgttgatgtagatgagctcatcaaggatgcgataaagaatggtaccggccttttgtga

SEQ ID NO: 11361 - DNA, 474 bp, Saccharomyces cerevisiae
atgccaattgaccaagaaaaattagctaagctacaaaagttgtctgctaacaacaaagttggtggtactagaagaaagcttaacaagaaggcaggctcttctgccggtgccaacaaggatgacaccaagttgcaaagtcaattagctaagttgcacgctgtcaccattgacaacgtcgccgaagccaactttttcaaggacgacggtaaggtcatgcacttcaacaaggtcggtgtccaagttgctgctcaacacaacacttctgtattctacggtctaccacaggaaaagaacttgcaagatttgttcccaggtattatctctcaattgggccctgaagccatccaagccttgtctcaattggctgcccaaatggaaaagcacgaagccaaggctccagctgatgctgaaaagaaggatgaagctattccagagttagttgaaggtcaaacttttgatgctgacgtcgaataa

SEQ ID NO: 11362 - DNA, 474 bp, Artificial Sequence
  Description of Artificial Sequence: Synthetic polynucleotide
atgccaattgaccaagaaaaattagctaagttacaaaagttgtctgctaacaacaaagttggtggtactagaagaaagcttaacaagaaggcaggctcttctgccggtgccaacaaggatgacaccaagttgcaaagtcaattagctaagttgcacgctgtcaccattgacaacgtcgccgaagccaactttttcaaggacgacggtaaggtcatgcacttcaacaaggtcggtgtccaagttgctgctcaacacaacacttctgtattctacggtttgccacaggaaaagaacttgcaagatttgttcccaggtattatctctcaattgggccctgaagccatccaagccttgtctcaattggctgcccaaatggaaaagcacgaagccaaggctccagctgatgctgaaaagaaggatgaagctattccagagttagttgaaggtcaaacttttgatgctgacgtcgaatga

SEQ ID NO: 11363 - DNA, 2844 bp, Saccharomyces cerevisiae
atgtcttccactgaagcaaagcaatacaaggagaaaccctcgaaagagtacctccatgccagtgatggcgatgaccctgcaaataattctgccgcttcttcgtcatcttcgtcttctacatcaacttccgcctcgtcatcggctgcagccgttccacggaaggccgcagccgcttctgccgctgatgattctgactcagatgaagatatagaccaattgattgatgaactacaatctaactacggtgagggtgatgaatctggtgaagaagaagtacgtactgatggggtgcacgctggccaaagggttgttcctgaaaaggacctttctacggaccctgcgtatggtttgacttcggatgaagtcgccaggagaagaaagaaatatgggttaaatcaaatggctgaggagaatgaatcgttgattgtgaagtttttgatgttcttcgtagggcctattcaattcgttatggaggctgctgctattttggctgccggtttgtctgattgggttgatgtcggtgtcatctgtgctttactgctattaaacgcatctgtcggatttattcaagaattccaggcaggttccatcgtagacgagctgaaaaagacgttggccaatactgcaacagttattagagatggccaattgatcgaaattccggctaatgaggtagttcctggtgagattttgcaattggaaagtggcacaattgctcccgcagatggtcgtattgtcactgaagactgttttttgcagatcgatcaatcggccatcactggtgaatccttagccgctgaaaagcattacggtgatgaggtgttctcctcatccactgtgaaaaccggcgaggcttttatggttgttactgccactggtgacaataccttcgtcggtagggctgccgccttagtggggcaggcttccggtgtagagggccatttcactgaagtattgaatggaattggtattatcttacttgttctagttatcgctactttgttgttggtctggaccgcatgtttctatagaacggtcggtattgtaagcattttgagatatactttgggtataaccatcattggtgtcccagtcggtttgccagcagttgttaccacgaccatggctgtcggtgcagcttacttggctaagaagcaagccattgttcaaaagttatctgctattgaatcccttgctggtgttgagattttatgttctgacaagactggtactttaaccaaaaacaagttatctttacacgaaccctacactgtcgaaggcgtttctccggacgacttgatgttgaccgcttgtttagctgcctctagaaagaagaaaggtttggatgctattgataaggcttttttgaagtcattgattgagtatccaaaagctaaagacgccctgaccaagtacaaagttttggaattccatccgttcgaccctgtctcaaaaaaggttaccgctgttgtagaatccccagaaggtgaaagaattgtttgtgtcaagggagccccattgtttgtcttgaagactgttgaagaagatcacccaattccggaagatgtgcatgaaaactacgaaaataaggttgctgaactagcttctagaggtttccgtgctttaggtgttgctagaaagagaggggaaggtcactgggaaatcttgggtgttatgccatgtatggacccccctagagatgacaccgctcaaacaatcaatgaggccagaaaccttggtttgagaatcaagatgttaaccggtgacgctgttggtatcgcgaaagaaacgtgtaggcaattaggacttggtacaaacatttataacgcagaaaggttaggtctgggaggtggaggtgatatgcctggttcagagttggctgattttgttgaaaatgccgatggtttcgcagaagttttcccacagcataaatacagagtcgttgaaatcttgcaaaacagaggttacttggttgctatgactggtgatggtgttaacgatgccccatctttgaagaaggctgatactggtattgctgtcgaaggtgctaccgatgctgccagatcagccgctgatattgttttcttggcccctggtctctctgctattattgatgccttaaagacttctagacagattttccacagaatgtactcctatgttgtttatcgtattgccctatccttacatttggagattttcctgggtttatggattgctattttaaacaactctttggatatcaatttgatcgtttttattgctattttcgcagacgttgccactttaactattgcttatgacaatgctccttatgctcctgaacctgtgaaatggaacctaccaagattatggggtatgtctattattttgggcatagttttagctataggttcttggattactttaaccaccatgttcttgcctaatggtggtattatccaaaattttggtgccatgaatggtgtcatgttcctgcagatttcactaactgaaaattggttaatttttgtcactagagctgctggcccattctggtcttccattccatcgtggcagttagccggtgccgttttcgccgttgatattattgctaccatgtttaccttatttggctggtggtctgaaaactggactgatattgtgtcagtcgttcgtgtctggatttggtccattggtattttttgtgtattgggaggattttactatattatgtccacgtctcaagcctttgataggttgatgaatggtaagtcattaaaggaaaagaagtctacaagaagtgtcgaagatttcatggctgctatgcaaagagtttctactcaacacgaaaaaagcagttag

SEQ ID NO: 11364 - DNA, 2844 bp, Artificial Sequence
  Description of Artificial Sequence: Synthetic polynucleotide
atgtcttccactgaagcaaagcaatacaaggagaaaccctctaaagagtacctccatgccagtgatggcgatgaccctgcaaataattctgccgcttcttcttcttcttcttcttctacatctacttccgcctcttcttctgctgcagccgttccaagaaaggccgcagccgcttctgccgctgatgattctgacagtgatgaagatatagaccaattgattgatgaattacaatctaactacggtgagggtgatgaatctggtgaagaagaagtacgtactgatggggtgcacgctggccaaagggttgttcctgaaaaggacctttctacggaccctgcgtatggtttgacttctgatgaagtcgccaggagaagaaagaaatatgggttaaatcaaatggctgaggagaatgaatctttgattgtgaagtttttgatgttcttcgtagggcctattcaattcgttatggaggctgctgctattttggctgccggtttgtctgattgggttgatgtcggtgtcatctgtgctttattattattaaacgcatctgtcggatttattcaagaattccaggcaggttccatcgtagacgagttgaaaaagacgttggccaatactgcaacagttattagagatggccaattgatcgaaattccggctaatgaggtagttcctggtgagattttgcaattggaaagtggcacaattgctcccgcagatggtcgtattgtcactgaagactgttttttgcagatcgatcaatctgccatcactggtgaatccttagccgctgaaaagcattacggtgatgaggtgttctcctcctccactgtgaaaaccggcgaggcttttatggttgttactgccactggtgacaataccttcgtcggtagggctgccgccttagtggggcaggcttccggtgtagagggccatttcactgaagtattgaatggaattggtattatcttacttgttttggttatcgctactttgttgttggtctggaccgcatgtttctatagaacggtcggtattgtaagcattttgagatatactttgggtataaccatcattggtgtcccagtcggtttgccagcagttgttaccacgaccatggctgtcggtgcagcttacttggctaagaagcaagccattgttcaaaagttatctgctattgaatcccttgctggtgttgagattttatgttctgacaagactggtactttaaccaaaaacaagttatctttacacgaaccctacactgtcgaaggcgtttctccggacgacttgatgttgaccgcttgtttagctgcctctagaaagaagaaaggtttggatgctattgataaggcttttttgaagtctttgattgagtatccaaaagctaaagacgccttgaccaagtacaaagttttggaattccatccgttcgaccctgtctccaaaaaggttaccgctgttgtagaatccccagaaggtgaaagaattgtttgtgtcaagggagccccattgtttgtcttgaagactgttgaagaagatcacccaattccggaagatgtgcatgaaaactacgaaaataaggttgctgaattggcttctagaggtttccgtgctttaggtgttgctagaaagagaggggaaggtcactgggaaatcttgggtgttatgccatgtatggacccccctagagatgacaccgctcaaacaatcaatgaggccagaaaccttggtttgagaatcaagatgttaaccggtgacgctgttggtatcgcgaaagaaacgtgtaggcaattaggacttggtacaaacatttataacgcagaaaggttaggtttgggaggtggaggtgatatgcctggttctgagttggctgattttgttgaaaatgccgatggtttcgcagaagttttcccacagcataaatacagagtcgttgaaatcttgcaaaacagaggttacttggttgctatgactggtgatggtgttaacgatgccccatctttgaagaaggctgatactggtattgctgtcgaaggtgctaccgatgctgccagatctgccgctgatattgttttcttggcccctggtctctctgctattattgatgccttaaagacttctagacagattttccacagaatgtactcctatgttgtttatcgtattgccctttccttacatttggagattttcttgggtttatggattgctattttaaacaactctttggatatcaatttgatcgtttttattgctattttcgcagacgttgccactttaactattgcttatgacaatgctccttatgctcctgaacctgtgaaatggaacttaccaagattatggggtatgtctattattttgggcatagttttagctataggttcttggattactttaaccaccatgttcttgcctaatggtggtattatccaaaattttggtgccatgaatggtgtcatgttcttacagatttctttgactgaaaattggttaatttttgtcactagagctgctggcccattctggtcttccattccatcttggcagttagccggtgccgttttcgccgttgatattattgctaccatgtttaccttatttggctggtggtctgaaaactggactgatattgtgtctgtcgttcgtgtctggatttggtccattggtattttttgtgtattgggaggattttactatattatgtccacgtctcaagcctttgataggttgatgaatggtaagtctttaaaggaaaagaagtctacaagaagtgtcgaagatttcatggctgctatgcaaagagtttctactcaacacgaaaaaagcagttga

SEQ ID NO: 11365 - DNA, 498 bp, Saccharomyces cerevisiae
atgaccactcgaaaaacagtagattcaagacttttagaatggcaaaccacatgcaagcatccagtgataaacttgactccagagaaagtcgataaattataccacttgaaattgaaaagtgaaagcaaaaatatcagttcaaacaggctattgcccatttcattatcaagcttacaaaaaaaaatggagaaacttttcatcaaagataaaagtcactcacacaagccttcccttccagatcctaaggtgccaaccctacgcacttataaagatggtggatttttcattagcggaaaaggttcaatgaaactaccagatatcgaaagcgctattcataaatttttatggaagaaatacgggaaaggattggtttactgttatgggtgtgatccaactggaaaaaagaggcatacagagtggttcaatgtgcctgtattggagctaccatcagtactaagacttattgattcttattgccttggaggagaatctcgttag

SEQ ID NO: 11366 - DNA, 498 bp, Artificial Sequence
  Description of Artificial Sequence: Synthetic polynucleotide
atgaccactagaaaaacagtagattccagacttttagaatggcaaaccacatgcaagcatccagtgataaacttgactccagagaaagtcgataaattataccacttgaaattgaaaagtgaaagcaaaaatatcagtagtaacaggttattgcccatttctttatccagcttacaaaaaaaaatggagaaacttttcatcaaagataaaagtcactctcacaagccttcccttccagatcctaaggtgccaaccttacgcacttataaagatggtggatttttcattagcggaaaaggttctatgaaattaccagatatcgaaagcgctattcataaatttttatggaagaaatacgggaaaggattggtttactgttatgggtgtgatccaactggaaaaaagaggcatacagagtggttcaatgtgcctgtattggagttaccatctgtattaagacttattgattcttattgccttggaggagaatctcgttga

SEQ ID NO: 11367 - DNA, 846 bp, Saccharomyces cerevisiae
atgaagaaaacaatttacaaagtcctcgtaagtttttatcaatatgtcggtttaggtaaaaagttccatcctagccacgatacagtattaattattggcggttcttcaaatgagttaggcatcgagctctgcgagacatttatagaagattatcatacaaaggttataaatattgacactatagacagtattaatggaaaaaacgcaaggagaagtgaaaaactgtatacttttatttcttgcaaagatttcagtgacataaaatgtcttgaggaatccatgctttaccttcaaaatttagaaataattcctacagtgctcattaacaacatgcaggagggaatcgaatcgactcttctcaaagaagacaaatttttgagacttgatgaagagtctttaaatgaattcgagaaaatcgtgaggtataatttacaaagtgtaatattgataactaagttctgcttgagtaacatttttccaaaggttcaagctgaagctcaagaaaaagcaaaggggttctatattgtcaacatatcatcggtattgacgttaaaaccgtgcaaatcaggaacacattttattacatcgaaatgtggtataaactctttccacgatggaataacctcagagcttaaattgaaagatagtaatttgaatgtaaaaacgctgattgcatatttacccagttttgaaagtgaagcacattggaagagactttccccgagtatctcgaaacatctcgtccactgtctacttgagggaagatatggtgatacaattctcgaaagcaaaagatcaattggtgatattcttttgataactggtttcaaaagctcttttacttaa

SEQ ID NO: 11368 - DNA, 846 bp, Artificial Sequence
  Description of Artificial Sequence: Synthetic polynucleotide
atgaagaaaacaatttacaaagtcctcgtaagtttttatcaatatgtcggtttaggtaaaaagttccatcctagccacgatacagtattaattattggcggttcttccaatgagttaggcatcgagctctgcgagacatttatagaagattatcatacaaaggttataaatattgacactatagacagtattaatggaaaaaacgcaaggagaagtgaaaaactttatacttttatttcttgcaaagatttcagtgacataaaatgtcttgaggaatccatgctttaccttcaaaatttagaaataattcctacagtgctcattaacaacatgcaggagggaatcgaatctactcttctcaaagaagacaaatttttgagacttgatgaagagtctttaaatgaattcgagaaaatcgtgaggtataatttacaaagtgtaatattgataactaagttctgcttgagtaacatttttccaaaggttcaagctgaagctcaagaaaaagcaaaggggttctatattgtcaacatatcttctgtattgacgttaaaaccgtgcaaaagtggaacacattttattacaagtaaatgtggtataaactctttccacgatggaataacctctgagcttaaattgaaagatagtaatttgaatgtaaaaacgttgattgcatatttacccagttttgaaagtgaagcacattggaagagactttccccgagtatctccaaacatctcgtccactgtttgcttgagggaagatatggtgatacaattctcgaaagcaaaagatctattggtgatattcttttgataactggtttcaaaagctcttttacttga

SEQ ID NO: 11369 - DNA, 2478 bp, Saccharomyces cerevisiae
atgtcgtcttcctcacttcgagttttagctattgggaacaacccgaatatcttgttctacacctcaaggtttcaactggccaagaatatagacctctaccacgtcaacgattcaaaatcatgtcaatttgaaattgaaactgaatactacggcaaagaccggttcgaattggaaaatcatttcacctctatcgagcacttgactgaagctttgagctccaaatcaagtgaagccgtcttcgacataatcatcatgagtgctccatctttacaggaattatcctcgttagcgtccaagttaacgtccataatcgattcgaacaccaaaattttcttagaaagcagtggtttcatccaattggaaccgtttgtcaaattatcgatggaatctccgcatgtaaacgttttcagtattttgactgatttggatattcgtcaaatcggtccaaaccatttcaaacactttcctagtactgcaaaggagaacacgatttacctcggcgaaagtaagtccagcactgagaaatattcatcaggcgttataacattattaaccacttttgaaaaactgtttgctaaattgttttccaacataaaaatcaatttgtgcaatttctcatcaattgagtttctatcacaacaatggaagctggcgatttccagaatttgttttgatccgttgttaatcatgtttgaacaagaaaacccaagtgatctagaccagcagatcattgccaaacctttaatatcaggtctggtaactgaaatcatcactgtagcaaaaacaatgggagccagactaaacagtagtcatgataatgaaaactctcttttatctctatggaagaattcttatcattcaaccaataagccacctgcattggtttatcatttcattcatcaaacaacgcctttgaacatcgatatcctgttgttacaaactattttattagccgatgactttggtatcaaaactccgtacttagaatttttatactctgttttgtcccaatttgaaagattgaatagtggcaaatctaaatggtttattaggtcagatgaaaaaactcaaatcttacaaagcttgcaaaaatcacaaaaaaatgaatctgctttacagactcaaattacctccttacaaggtcaaattagtaaactaagacaagagttgcttatgcaggccaagcaacatgaaatggaaactaatgagttaaaggagaaacatcaagtcgctctaaaagcccaggcccaagcccaagctcaagcccaatctcaagctcaaacatcaattgaagcactaacgccaactgaagcaacaaaccaatccgatacaaatgaatataaagcaacaggaactccgaatttgagggacatcgaagatatggcactatatagtgtaaactacggagactctccagtgagatctccaccacctgttgtaagctctcagccacaaatgaactcaccattatcctcacattcacaaactttcggagagaataatggcacgaatgacaaattactacaagaacgcgaattgcaactccgtaaaaaggaattagagctacaagaacgtgaactggagttccagaaaagagcattacagcaacaaagatttaataatagcaataattcaattccaagaaagccttccttccctcaattacagcagtctgcaaacgttcgttctaacagcagaggaatgcatggcaccaatggcgctatgtctcaacctgcatccgccggaaattttgtagacccaatttcttcaagtatcgctgcatatgacccgcaacaacctccttccttacccctacagcagccacaacaatcggtacaagtacaaccttttcactcacactctatcaagcccacaagtaggaagaatagaaatagtaatatgcctaatattggtaatccttccagtataaatatgagtgattttggcagaccaccgaacaattcaagtcaaactcgcttaaattccatgccaacgcatagcatcgtaaaccagaatagattgagatcacaacaatcgaaaaacaaactgaatatgccacatgccaccaacccaaacaatacttttaaccaagtccctgctcctagtttaaacaatcacgttcccacacaaaggcaatttagctccagtaccatgatagaagttacaaataataacaacaaagttaataacagtagtagcaaccctgatatttccaccaactcggtagttcataacgcaatgcaatttacaaatacaaacaacaatacaagtagcactgtggatataaacgatcccaaaaatattgcaccccctcctacaacctctgtttcagccccaagcactccaaccttgtcctcatcaagtcaaatggcgaatatggcttcgcctagtaccgataatggtgacaatgaggagaaaaatggtggtaagaagaagagatttggcctattcaaaaaaaaaaataaatcaaagaaataa

SEQ ID NO: 11370 - DNA, 2478 bp, Artificial Sequence
  Description of Artificial Sequence: Synthetic polynucleotide
atgtcttcttcctctcttcgtgttttagctattgggaacaacccgaatatcttgttctacacctctaggtttcaattggccaagaatatagacctctaccacgtcaacgattctaaaagttgtcaatttgaaattgaaactgaatactacggcaaagacagattcgaattggaaaatcatttcacctctatcgagcacttgactgaagctttgagctccaaatctagtgaagccgtcttcgacataatcatcatgagtgctccatctttacaggaattatcctctttagcgtccaagttaacgtccataatcgattccaacaccaaaattttcttagaaagcagtggtttcatccaattggaaccgtttgtcaaattatctatggaatctccgcatgtaaacgttttcagtattttgactgatttggatattcgtcaaatcggtccaaaccatttcaaacactttcctagtactgcaaaggagaacacgatttacctcggcgaaagtaagtccagcactgagaaatattcttctggcgttataacattattaaccacttttgaaaaattatttgctaaattgttttccaacataaaaatcaatttgtgcaatttctcttccattgagtttttatctcaacaatggaagttggcgatttccagaatttgttttgatccgttgttaatcatgtttgaacaagaaaacccaagtgatttggaccagcagatcattgccaaacctttaatatctggtttagtaactgaaatcatcactgtagcaaaaacaatgggagccagattgaacagtagtcatgataatgaaaactctcttttatctctttggaagaattcttatcattctaccaataagccacctgcattggtttatcatttcattcatcaaacaacgcctttgaacatcgatatcttgttgttacaaactattttattagccgatgactttggtatcaaaactccgtacttagaatttttatactctgttttgtcccaatttgaaagattgaatagtggcaaatctaaatggtttattaggtctgatgaaaaaactcaaatcttacaaagcttgcaaaaatctcaaaaaaatgaatctgctttacagactcaaattacctccttacaaggtcaaattagtaaattgagacaagagttgcttatgcaggccaagcaacatgaaatggaaactaatgagttaaaggagaaacatcaagtcgctttgaaagcccaggcccaagcccaagctcaagcccaatctcaagctcaaacatccattgaagcattgacgccaactgaagcaacaaaccaatccgatacaaatgaatataaagcaacaggaactccgaatttgagggacatcgaagatatggcattatatagtgtaaactacggagactctccagtgagatctccaccacctgttgtaagctctcagccacaaatgaactctccattatcctctcattctcaaactttcggagagaataatggcacgaatgacaaattattacaagaacgcgaattgcaactccgtaaaaaggaattagagttacaagaacgtgaattagagttccagaaaagagcattacagcaacaaagatttaataatagcaataattctattccaagaaagccttccttccctcaattacagcagtctgcaaacgttcgttctaacagcagaggaatgcatggcaccaatggcgctatgtctcaacctgcatccgccggaaattttgtagacccaatttcttccagtatcgctgcatatgacccgcaacaacctccttccttacccttgcagcagccacaacaaagtgtacaagtacaaccttttcactctcactctatcaagcccacaagtaggaagaatagaaatagtaatatgcctaatattggtaatccttccagtataaatatgagtgattttggcagaccaccgaacaatagtagtcaaactcgcttaaattccatgccaacgcatagcatcgtaaaccagaatagattgagatctcaacaaagtaaaaacaaattgaatatgccacatgccaccaacccaaacaatacttttaaccaagtccctgctcctagtttaaacaatcacgttcccacacaaaggcaatttagctccagtaccatgatagaagttacaaataataacaacaaagttaataacagtagtagcaaccctgatatttccaccaactctgtagttcataacgcaatgcaatttacaaatacaaacaacaatacaagtagcactgtggatataaacgatcccaaaaatattgcaccccctcctacaacctctgtttctgccccaagcactccaaccttgtcctcttccagtcaaatggcgaatatggcttcccctagtaccgataatggtgacaatgaggagaaaaatggtggtaagaagaagagatttggccttttcaaaaaaaaaaataaatccaagaaatga

SEQ ID NO: 11371 - DNA, 918 bp, Saccharomyces cerevisiae
atgtcttcttcttcacaatttaagcagttagaaaagcttggcaatggtacgtatgccacagtgtacaagggactgaacaaaaccacaggggtatatgttgccctgaaagaggtaaaactggattcagaggaaggtacaccctctacggccatccgtgagatctccctaatgaaagaattgaaacatgagaacattgttagactttatgacgttattcacacagagaacaagttgactttggtttttgaattcatggacaacgatttaaagaaatacatggattcccgcaccgtgggcaacacaccaagagggctagaactaaacttggttaaatacttccagtggcaactactgcaagggctggccttttgccatgaaaacaagattctccaccgtgatttaaaacctcaaaacctattaatcaacaagagaggccagttgaaattgggtgatttcggtctggcccgtgctttcggtattccggtcaacacattttcaagcgaagtcgtaacgttgtggtaccgtgctcctgatgtgctaatgggttctaggacgtactccacatccattgatatatggtcgtgtgggtgcattcttgcggaaatgataacgggtaagcctttgtttcctggcaccaacgacgaagaacaactgaaattgatcttcgacatcatgggcactcctaatgagtccctatggcccagtgtaacaaagttacccaaatacaacccaaatatccagcaacgaccaccaagagacctacgtcaagtattgcaaccacacaccaaagaaccgctagacgggaatctcatggatttcttacacggactcttgcaacttaatccggatatgaggctgagcgccaagcaggctctgcatcacccttggtttgcagagtactaccaccacgcttcataa

SEQ ID NO: 11372 - DNA, 918 bp, Artificial Sequence
  Description of Artificial Sequence: Synthetic polynucleotide
atgtcttcttcttctcaatttaagcagttagaaaagcttggcaatggtacgtatgccacagtgtacaagggattgaacaaaaccacaggggtatatgttgccttgaaagaggtaaaattggattctgaggaaggtacaccctctacggccatccgtgagatctccttgatgaaagaattgaaacatgagaacattgttagactttatgacgttattcacacagagaacaagttgactttggtttttgaattcatggacaacgatttaaagaaatacatggattcccgcaccgtgggcaacacaccaagagggttggaattgaacttggttaaatacttccagtggcaattattacaagggttagccttttgccatgaaaacaagattctccaccgtgatttaaaacctcaaaacttattaatcaacaagagaggccagttgaaattgggtgatttcggtttagcccgtgctttcggtattccggtcaacacattttctagcgaagtcgtaacgttgtggtaccgtgctcctgatgtgttgatgggttctaggacgtactccacatccattgatatatggtcttgtgggtgcattcttgcggaaatgataacgggtaagcctttgtttcctggcaccaacgacgaagaacaattgaaattgatcttcgacatcatgggcactcctaatgagtccttatggcccagtgtaacaaagttacccaaatacaacccaaatatccagcaaagaccaccaagagacttgcgtcaagtattgcaaccacacaccaaagaaccgttagacgggaatctcatggatttcttacacggactcttgcaacttaatccggatatgaggttgagcgccaagcaggctttacatcacccttggtttgcagagtactaccaccacgcttcttga

SEQ ID NO: 11373 - DNA, 1704 bp, Saccharomyces cerevisiae
atgactggcgacggtagtgcacatatttctaaaaacaatcaaaatcaacacaaagatcgcttcaagtttattgtgaatgataaaagtattctaggacctcaatggttaagcctttaccaaacggatgggaaagtaacattcgcaaagtcccacttcgagcaagcaatgatgaacgttattagagaaccaaatattaactctactgtcatattaagagcggatattttgaaagagatcaatcatgctgcagaagctgggtctgagccaaaatttgacgagtccgtattaaaaaagtttgagatcgataatggtaatgaaagcggtgaagaagatgtcaagaagataaatattgaagatttaaacataaggtcgtgtgaaacatctgagagtttaaaattgtcacccgttcatgaatttgtaagaaggatcattcctaggaatttttacaaagatgctatcataaaccaaacatgtttaatcctaaatagcaaagaccctaattttcaggagacctcattgattgtatatacgccgcacattaactctgagaaagactgtccgttttatattccaagaacgcaaagtgtaggcattttgttacaccagtcagttctttctgtacactacattcccttccccgaggataaaactgcctttacagatgaatctgagcgtgttgtaagaaccgcttataggttattacaaactgctaacaaacactcaaagggtgtgatgcagggttatgaaaagagggtcaatcacgatcaagtggtaaataaagtcaattttcagaacacatacattgttttgaagaaaaaatactccaagttcctggtggagaattgggcagagtctacagacccaaaaaaacatgtttttgaagacatagccattgccgctttcctgattgaattatggattaaagtgtacggtccagacttccgttcaaaaatgcaatttagagatttgggatgcggcaatggtgctctttgttatattttactgagtgaaagtattaaaggtctcggcatagatgcaaggaagcgcaaatcgtggtctatctacccgcctgaagtgcaatcatcgttaaaggagcaagttataataccttctatccttttaagaccccatcctgctttgaaaagacaagtacctcatttggaacacaatgggagatttttcccagtcaaggtgacgcacgaagtgattgcccccgcaaccgtcgtgtattcaagtgaggacttactaaaatctccgcaggtcaatacagcagagttcccaccagatacttttattataggtaaccactcagatgagttgacttgctggatcccattactaggtcatccttatatggttataccttgttgctctcataatttttctggccagagagttcgttttaacgtaaggaaacgttcgcctaggtcaaatgaaatcaaaaaccagaataacagtaagagcacctactctggtttggttgatcacgttgaatatatttcatctcgtgtaggctggaaagtagagaaagagatgttaaggataccaagcacaagaaatgcagccatcataggtgtagaaaatgcaaccttaaagcattttccaacgcaagcagtgtacgatatgatttgggaagacggtggagctgaagggtggattcagaacacaatgtccttattgaaaagaaacccaagaaaccattaa

SEQ ID NO: 11374 - DNA, 1704 bp, Artificial Sequence
  Description of Artificial Sequence: Synthetic polynucleotide
atgactggcgacggtagtgcacatatttctaaaaacaatcaaaatcaacacaaagatcgcttcaagtttattgtgaatgataaaagtattttaggacctcaatggttaagcctttaccaaacggatgggaaagtaacattcgcaaagtcccacttcgagcaagcaatgatgaacgttattagagaaccaaatattaactctactgtcatattaagagcggatattttgaaagagatcaatcatgctgcagaagctgggtctgagccaaaatttgacgagtccgtattaaaaaagtttgagatcgataatggtaatgaaagcggtgaagaagatgtcaagaagataaatattgaagatttaaacataaggagttgtgaaacatctgagagtttaaaattgagccccgttcatgaatttgtaagaaggatcattcctaggaatttttacaaagatgctatcataaaccaaacatgtttaatcttgaatagcaaagaccctaattttcaggagacctctttgattgtatatacgccgcacattaactctgagaaagactgtccgttttatattccaagaacgcaaagtgtaggcattttgttacaccagtctgttctttctgtacactacattcccttccccgaggataaaactgcctttacagatgaatctgagcgtgttgtaagaaccgcttataggttattacaaactgctaacaaacactccaagggtgtgatgcagggttatgaaaagagggtcaatcacgatcaagtggtaaataaagtcaattttcagaacacatacattgttttgaagaaaaaatactccaagttcttggtggagaattgggcagagtctacagacccaaaaaaacatgtttttgaagacatagccattgccgctttcttgattgaattatggattaaagtgtacggtccagacttccgttctaaaatgcaatttagagatttgggatgcggcaatggtgctctttgttatattttattaagtgaaagtattaaaggtctcggcatagatgcaaggaagcgcaaaagttggtctatctacccgcctgaagtgcaatcttctttaaaggagcaagttataataccttctatccttttaagaccccatcctgctttgaaaagacaagtacctcatttggaacacaatgggagatttttcccagtcaaggtgacgcacgaagtgattgcccccgcaaccgtcgtgtattctagtgaggacttattgaaatctccgcaggtcaatacagcagagttcccaccagatacttttattataggtaaccacagtgatgagttgacttgctggatcccattattgggtcatccttatatggttataccttgttgctctcataatttttctggccagagagttcgttttaacgtaaggaaacgtagtcctaggtctaatgaaatcaaaaaccagaataacagtaagagcacctactctggtttggttgatcacgttgaatatatttcttctcgtgtaggctggaaagtagagaaagagatgttaaggataccaagcacaagaaatgcagccatcataggtgtagaaaatgcaaccttaaagcattttccaacgcaagcagtgtacgatatgatttgggaagacggtggagctgaagggtggattcagaacacaatgtccttattgaaaagaaacccaagaaaccattga

SEQ ID NO: 11375 - DNA, 2214 bp, Saccharomyces cerevisiae
atggcacttgtcaaatacagcacagttttttttccactccgatcattgcgactgtttgtgtccatcaagaaagcatattaccacagcgagccgcatagcatcgatctatttcatgataaggattggattgtgaaaagacctaaattcctaaatttacccaaaaatgaacattcaaaattagatatattccagtttaattttaacaagtccgaaagcaataatgtgtatttacaggattcatcatttaaagataaccttgataaagcgatgcaatttatctataacgataaattgtcatccttggatgccaagcaagtaccaataaagaatcttgcttggttgaaattaagagattacatatatcaacaactaaaagatccgaaactgcaagccaaaacctatgtaccttcggtaagtgagatcatacatccttcatctcctggcaatttgatttcgttgctgataaattgcaataaaatcagcaatttagtctggaaatctgttctcaaatatagcctgagtaacaatataactacattggataaatttatccacgtcctgcaacagaccttcgaccatgtgtacgagcaggagatactacccatgatgacgaatacagatgatacagatggcgctcacaacgttgacataacaaatccagcagagtggtttccggaggcaagaaagattagaagacatataatcatgcacattgggcccacgaattcaggcaaaacttatagagcgttacagaaattgaaatccgtggaccgtgggtactacgcagggccgttaagactgctagcaagggaagtgtacgatagatttcatgcagaaaagataagatgcaatttactgactggagaggaagttattcgtgatttggatgatagaggaaattcagcagggctgacatcaggcacagtagaaatggtgccaataaatcaaaaatttgacgttgttgttcttgatgaaattcaaatgatgtctgatggggatcgtggctgggcttggacgaacgcgcttttaggtgtcgtttccaaggaggtccatctttgtggtgaaaagagtgttctacctttggttaagagcattgttaaaatgactggcgataaattaacgattaatgaatatgagaggttaggaaagttaagtgttgaagaaaaacctatcaaagatggcatcaaaggtttgcgcaaaggagattgcgtcgttgcgttttcaaagaagaaaatattggatctcaagctaaagatagagaaagacaccaatttgaaagttgctgtaatttatggctctttgccgcctgaaacacgtgttcaacaagccgccctattcaacaatggagagtatgacataatggtagcatcagacgctattggtatgggtttaaacctgtctattgacagagttgtattcacgacaaatatgaaatataatggtgaagaactaatggaaatgacttcttctcaaatcaaacaaataggtggtcgtgcgggaaggttcaaatctagatctgcctccgggggtgttcctcagggttttatcaccagtttcgaatcaaaagttttgaaaagtgtaagaaaagctattgaagcacctgtggagtatttaaaaactgcggttacatggcctacagatgaaatatgtgctcaactaatgacacaattcccaccaggaacgccgaccagtgtcctgctgcagactatttcagatgagctagagaaaagttctgacaacctgttcacgttatctgatttaaagagcaaactgaaagttattggcttattcgagcacatggaagatatcccatttttcgacaagctgaaactaagcaatgcgcccgtgaaggacatgcctatggtcacaaaggcgttcaccaaattttgcgaaacaatagcaaaaaggcatacaagaggcctactgtcataccgattaccttttaacctactggactacaattgcataccgaatgagagttattcattagaggtttatgagtcattgtacaacatcattactctatacttctggctcagcaacaggtacccaaactacttcattgacatggaatctgctaaagatttgaagtatttctgtgagatgattattttcgagaaacttgatcgattaaagaagaatccttacgcacataagccctttggttctacaagaggtcacctctcatcttcgagaagaagattgcgtacataa

SEQ ID NO: 11376 - DNA, 2214 bp, Artificial Sequence
  Description of Artificial Sequence: Synthetic polynucleotide
atggcacttgtcaaatacagcacagttttttttccactcagaagtttgagattatttgtgtccatcaagaaagcatattaccacagcgagccgcatagcatcgatttatttcatgataaggattggattgtgaaaagacctaaattcttgaatttacccaaaaatgaacattctaaattagatatattccagtttaattttaacaagtccgaaagcaataatgtgtatttacaggattcttcttttaaagataaccttgataaagcgatgcaatttatctataacgataaattgtcttccttggatgccaagcaagtaccaataaagaatcttgcttggttgaaattaagagattacatatatcaacaattgaaagatccgaaattacaagccaaaacctatgtaccttctgtaagtgagatcatacatccttcttctcctggcaatttgatttctttgttaataaattgcaataaaatcagcaatttagtctggaaatctgttctcaaatatagcttaagtaacaatataactacattggataaatttatccacgtcttacaacagaccttcgaccatgtgtacgagcaggagatattgcccatgatgacgaatacagatgatacagatggcgctcacaacgttgacataacaaatccagcagagtggtttccggaggcaagaaagattagaagacatataatcatgcacattgggcccacgaatagtggcaaaacttatagagcgttacagaaattgaaatccgtggaccgtgggtactacgcagggccgttaagattattggcaagggaagtgtacgatagatttcatgcagaaaagataagatgcaatttattaactggagaggaagttattcgtgatttggatgatagaggaaattctgcagggttgacaagtggcacagtagaaatggtgccaataaatcaaaaatttgacgttgttgttcttgatgaaattcaaatgatgtctgatggggatcgtggctgggcttggacgaacgcgcttttaggtgtcgtttccaaggaggtccatctttgtggtgaaaagagtgttttacctttggttaagagcattgttaaaatgactggcgataaattaacgattaatgaatatgagaggttaggaaagttaagtgttgaagaaaaacctatcaaagatggcatcaaaggtttgcgcaaaggagattgcgtcgttgcgttttccaagaagaaaatattggatctcaagttgaagatagagaaagacaccaatttgaaagttgctgtaatttatggctctttgccgcctgaaacacgtgttcaacaagccgcccttttcaacaatggagagtatgacataatggtagcaagtgacgctattggtatgggtttaaacttatctattgacagagttgtattcacgacaaatatgaaatataatggtgaagaattgatggaaatgacttcttctcaaatcaaacaaataggtggtcgtgcgggaaggttcaaatctagatctgcctccgggggtgttcctcagggttttatcaccagtttcgaaagtaaagttttgaaaagtgtaagaaaagctattgaagcacctgtggagtatttaaaaactgcggttacatggcctacagatgaaatatgtgctcaattgatgacacaattcccaccaggaacgccgaccagtgtcttattgcagactatttctgatgagttagagaaaagttctgacaacttgttcacgttatctgatttaaagagcaaattgaaagttattggcttattcgagcacatggaagatatcccatttttcgacaagttgaaattaagcaatgcgcccgtgaaggacatgcctatggtcacaaaggcgttcaccaaattttgcgaaacaatagcaaaaaggcatacaagaggcttattatcttacagattaccttttaacttattagactacaattgcataccgaatgagagttattctttagaggtttatgagtctttgtacaacatcattactttgtacttctggctcagcaacaggtacccaaactacttcattgacatggaatctgctaaagatttgaagtatttctgtgagatgattattttcgagaaacttgatagattaaagaagaatccttacgcacataagccctttggttctacaagaggtcacctctcttcttctagaagaagattgcgtacatga

SEQ ID NO: 11377 - DNA, 1197 bp, Saccharomyces cerevisiae
atgtctcagaacgtttacattgtatcgactgccagaaccccaattggttcattccagggttctctatcctccaagacagcagtggaattgggtgctgttgctttaaaaggcgccttggctaaggttccagaattggatgcatccaaggattttgacgaaattatttttggtaacgttctttctgccaatttgggccaagctccggccagacaagttgctttggctgccggtttgagtaatcatatcgttgcaagcacagttaacaaggtctgtgcatccgctatgaaggcaatcattttgggtgctcaatccatcaaatgtggtaatgctgatgttgtcgtagctggtggttgtgaatctatgactaacgcaccatactacatgccagcagcccgtgcgggtgccaaatttggccaaactgttcttgttgatggtgtcgaaagagatgggttgaacgatgcgtacgatggtctagccatgggtgtacacgcagaaaagtgtgcccgtgattgggatattactagagaacaacaagacaattttgccatcgaatcctaccaaaaatctcaaaaatctcaaaaggaaggtaaattcgacaatgaaattgtacctgttaccattaagggatttagaggtaagcctgatactcaagtcacgaaggacgaggaacctgctagattacacgttgaaaaattgagatctgcaaggactgttttccaaaaagaaaacggtactgttactgccgctaacgcttctccaatcaacgatggtgctgcagccgtcatcttggtttccgaaaaagttttgaaggaaaagaatttgaagcctttggctattatcaaaggttggggtgaggccgctcatcaaccagctgattttacatgggctccatctcttgcagttccaaaggctttgaaacatgctggcatcgaagacatcaattctgttgattactttgaattcaatgaagccttttcggttgtcggtttggtgaacactaagattttgaagctagacccatctaaggttaatgtatatggtggtgctgttgctctaggtcacccattgggttgttctggtgctagagtggttgttacactgctatccatcttacagcaagaaggaggtaagatcggtgttgccgccatttgtaatggtggtggtggtgcttcctctattgtcattgaaaagatatga

SEQ ID NO: 11378 - DNA, 1197 bp, Artificial Sequence
  Description of Artificial Sequence: Synthetic polynucleotide
atgtctcagaacgtttacattgtatccactgccagaaccccaattggttctttccagggttctttatcctccaagacagcagtggaattgggtgctgttgctttaaaaggcgccttggctaaggttccagaattggatgcatccaaggattttgacgaaattatttttggtaacgttctttctgccaatttgggccaagctccggccagacaagttgctttggctgccggtttgagtaatcatatcgttgcaagcacagttaacaaggtctgtgcatccgctatgaaggcaatcattttgggtgctcaatccatcaaatgtggtaatgctgatgttgtcgtagctggtggttgtgaatctatgactaacgcaccatactacatgccagcagcccgtgcgggtgccaaatttggccaaactgttcttgttgatggtgtcgaaagagatgggttgaacgatgcgtacgatggtttagccatgggtgtacacgcagaaaagtgtgcccgtgattgggatattactagagaacaacaagacaattttgccatcgaatcctaccaaaaatctcaaaaatctcaaaaggaaggtaaattcgacaatgaaattgtacctgttaccattaagggatttagaggtaagcctgatactcaagtcacgaaggacgaggaacctgctagattacacgttgaaaaattgagatctgcaaggactgttttccaaaaagaaaacggtactgttactgccgctaacgcttctccaatcaacgatggtgctgcagccgtcatcttggtttccgaaaaagttttgaaggaaaagaatttgaagcctttggctattatcaaaggttggggtgaggccgctcatcaaccagctgattttacatgggctccatctcttgcagttccaaaggctttgaaacatgctggcatcgaagacatcaattctgttgattactttgaattcaatgaagccttttctgttgtcggtttggtgaacactaagattttgaagttggacccatctaaggttaatgtatatggtggtgctgttgctttgggtcacccattgggttgttctggtgctagagtggttgttacattgttatccatcttacagcaagaaggaggtaagatcggtgttgccgccatttgtaatggtggtggtggtgcttcctctattgtcattgaaaagatatga

SEQ ID NO: 11379 - DNA, 738 bp, Saccharomyces cerevisiae
atggcatgtactaatgatggtcctaataaatatcccgaaattgtgagtgttaagcacctgttccaacattcgggatccaagcatgaatttagtgctggtaaacgattttcaaaatccattggtaaaatattcaaacgaaactctgctttgaaaacttctagaactgaaacggcaaatcataaaatggaattgaaaaaaagagagggtgttaccttattgccacctgtcccagaatcattattacataaactcaattcttggttggaaactttttcttccaccaagaacatgaaaatcgaagaaaacaaaattgttattaatgaaaaagagattcgggattcagtctcttactaccctgataagaatggaggaagtgctgtattttgttacttgcccgaccttgtgctatattataagccgcctataaaagtcacaggcaagcaatgtccaataaagagaagtccttgggaatcgatggaaatccaatatcaaaagtttatgtaccccttagaaaggttggaaagacagtttgaggaagttccatttaggccctggtattttgcaatgcgattaaaggaactttacagatgctgtgaaaggtcttttactaacgcggcaaatagaggaaaggcaaggttattgcgggggaagcaaaggacgaaaaaatcgtatcataagactgtcaacctggtatcagcgaagatttccacccattcaaatgcgccgtcgccgggctga

SEQ ID NO: 11380 - DNA, 738 bp, Artificial Sequence
  Description of Artificial Sequence: Synthetic polynucleotide
atggcatgtactaatgatggtcctaataaatatcccgaaattgtgagtgttaagcaccttttccaacattctggatccaagcatgaatttagtgctggtaaaagattttccaaatccattggtaaaatattcaaaagaaactctgctttgaaaacttctagaactgaaacggcaaatcataaaatggaattgaaaaaaagagagggtgttaccttattgccacctgtcccagaatctttattacataaactcaattcttggttggaaactttttcttccaccaagaacatgaaaatcgaagaaaacaaaattgttattaatgaaaaagagattagagattctgtctcttactaccctgataagaatggaggaagtgctgtattttgttacttgcccgaccttgtgctttattataagccgcctataaaagtcacaggcaagcaatgtccaataaagagaagtccttgggaaagtatggaaatccaatatcaaaagtttatgtaccccttagaaaggttggaaagacagtttgaggaagttccatttaggccctggtattttgcaatgagattaaaggaactttacagatgctgtgaaaggtcttttactaacgcggcaaatagaggaaaggcaaggttattgagagggaagcaaaggacgaaaaaaagttatcataagactgtcaacttggtatctgcgaagatttccacccattctaatgcgccgtctccgggctga

SEQ ID NO: 11381 - DNA, 1509 bp, Saccharomyces cerevisiae
atgctgtcagactgcttgctgaacaatttcagaataacggctcaaatagggtcgggtgcgtatggactagtgttccatgtggtggatatactgacgagccgtgaatatgcagtgaaaacggtcttcaaatcctcctcgatggatgagttttataataagaacggtttgaacaacaactctcaagtggcgcgaaccactcttctgcaaacgcaactgtatcattttttcaaaagtttccaaaaaaaattgttcttaccttccgttgatctagactcgatattacagttgactgagaatgaactaaataggctaccacactacagggagattgccttccaactaagagtgcagtctcacggcaatatcgtgaagattcaccaagttttagaatcttctattgccacttttatagtgatggattattacgacagggaccttttcacctcgatagttgacgataagcattttgtaaatcatggtattttgattaagaaagtttttctgcagctttgctccgcattagatcactgtcatcgtctcggtatatatcattgtgatatcaaacctgaaaatgtcctactggatcgcaatgacaacgcttatctttgcgatttcgggctttccactaaatctaaatatctagctccaaatgtgtgcgttggcagttcatattatatggctccagaaagaatattgtattgtttgaataccaccaccaacggcatacacgtcgacgaatgctgttcgagcctccctacggatacaggagatatatggtctctaggcatcatcctaattaatttaacttgcataagaaacccatggttaaaagctcaccagaaggaggataacacatttcaacattttgctaacgataataatgtcctgaagaaaatccttcctatatcagatgagctgttcacagtgttgacgaaaattctacaactaaatccatacacaagaatagacatgaaaactttgatgtccgaagtttcctctcttacttctttcaccagggaagggcccttgtctcaagttccaatcctatcgagcgaagtttacatgacgcatattataaggaatgaaaacctatttttgagcgatttatcacatttttctgcagaccaagaacaacaacaacaacagcaacaacaacaacagcaagtccaagaacaagaacaggaacaaaaacaagaacaaatacaaaaccaggaacaagcacaacagcagcaagaagaggaagatgctgaaccggagagtgatattccatcaacgtataatagtgacggaagtatggaaaagtatgaatacactaacaaccacaataatagtacctttttaacttcctcaatggacagtacaccttaccaatctgatatcgatgacgttagtgcttccaaagattgcaaattccaacaagatacattaagaaataggctattatgcttacaaatgaatttttctactttaacagacggtccaaacgagaaatggttaccagattattga

SEQ ID NO: 11382 - DNA, 1509 bp, Artificial Sequence
  Description of Artificial Sequence: Synthetic polynucleotide
atgctttctgactgcttgttgaacaatttcagaataacggctcaaatagggtctggtgcgtatggattggtgttccatgtggtggatatattaacgagccgtgaatatgcagtgaaaacggtcttcaaatcctcctctatggatgagttttataataagaacggtttgaacaacaactctcaagtggcgcgtaccactcttttacaaacgcaattatatcattttttcaaaagtttccaaaaaaaattgttcttaccttccgttgatttggacagtatattacagttgactgagaatgaattgaataggttaccacactacagggagattgccttccaattgagagtgcagtctcacggcaatatcgtgaagattcaccaagttttagaatcttctattgccacttttatagtgatggattattacgacagggaccttttcaccagtatagttgacgataagcattttgtaaatcatggtattttgattaagaaagtttttttgcagctttgctccgcattagatcactgtcatcgtctcggtatatatcattgtgatatcaaacctgaaaatgtcttattagatcgcaatgacaacgcttatctttgcgatttcgggctttccactaaatctaaatatttggctccaaatgtgtgcgttggcagttcttattatatggctccagaaagaatattgtattgtttgaataccaccaccaacggcatacacgtcgacgaatgctgtagcagcctccctacggatacaggagatatatggtctttaggcatcatcttgattaatttaacttgcataagaaacccatggttaaaagctcaccagaaggaggataacacatttcaacattttgctaacgataataatgtcttgaagaaaatccttcctatatctgatgagcttttcacagtgttgacgaaaattttacaattgaatccatacacaagaatagacatgaaaactttgatgtccgaagtttcctctcttacttctttcaccagggaagggcccttgtctcaagttccaatcttatccagcgaagtttacatgacgcatattataaggaatgaaaacttgtttttgagcgatttatctcatttttctgcagaccaagaacaacaacaacaacagcaacaacaacaacagcaagtccaagaacaagaacaggaacaaaaacaagaacaaatacaaaaccaggaacaagcacaacagcagcaagaagaggaagatgctgaaccggagagtgatattccatctacgtataatagtgacggaagtatggaaaagtatgaatacactaacaaccacaataatagtacctttttaacttcctctatggacagtacaccttaccaatctgatatcgatgacgttagtgcttccaaagattgcaaattccaacaagatacattaagaaataggttattatgcttacaaatgaatttttctactttaacagacggtccaaacgagaaatggttaccagattattga

SEQ ID NO: 11383 - DNA, 726 bp, Saccharomyces cerevisiae
atgtctttttcatctatcttatcacaggatatcacagatgacattacaccaccagcgtattccgccaccttggggtcgagagaacagattgttttcagagcttaccaaaatgaaccttggttggctggtactgcttcgaatcttatcttagataaaaaacttgttattgtagacagagaactgttgttccaggtgttgatggtagagaatatcaccaaatccaagctaacacagatcgatgatataaaaaccaagctggatccgaaaaaacagaaagtggatagactacgatcaggcgcgcaaggaaatggcgctaagaagtacgaggtcatcactcaagtggacatggaagatgacgggaatgtggcggataacaactgcgccaaggaaaataatagcaacaataatagcagtgccgccaagaataaagcagtgtttaaattgacactacaaagtaagtcgggcgacgttttttttgctatcaactcgactccaatatcttggagctcttgcatgctgggttctaaaattgtgatactgccgggaactgtgttcaataggggcgttttcatattgaaggactcacaagtcatttttctcggcggcattaatagagtttggaatgaaaatagagatcagaaattttgtgattatttggaatctaaattacaacgtgacaaacaacttgtaaatggcggctccaagaaaaggaaagccaatgattag

SEQ ID NO: 11384 - DNA, 726 bp, Artificial Sequence
  Description of Artificial Sequence: Synthetic polynucleotide
atgtctttttcttctatcttatctcaggatatcacagatgacattacaccaccagcgtattccgccaccttggggtccagagaacagattgttttcagagcttaccaaaatgaaccttggttggctggtactgcttctaatcttatcttagataaaaaacttgttattgtagacagagaattattgttccaggtgttgatggtagagaatatcaccaaatccaagttaacacagatcgatgatataaaaaccaagttggatccgaaaaaacagaaagtggatagattaagaagcggcgcgcaaggaaatggcgctaagaagtacgaggtcatcactcaagtggacatggaagatgacgggaatgtggcggataacaactgcgccaaggaaaataatagcaacaataatagcagtgccgccaagaataaagcagtgtttaaattgacattacaaagtaagtctggcgacgttttttttgctatcaactctactccaatatcttggagctcttgcatgttgggttctaaaattgtgatattaccgggaactgtgttcaataggggcgttttcatattgaaggactctcaagtcatttttctcggcggcattaatagagtttggaatgaaaatagagatcagaaattttgtgattatttggaatctaaattacaacgtgacaaacaacttgtaaatggcggctccaagaaaaggaaagccaatgattga

SEQ ID NO: 11385 - DNA, 1974 bp, Saccharomyces cerevisiae
atgtccatcagagatttatatcatgcgagggcttccccttttatatcgttagaattcttccctccaaagactgaattagggacgagaaatttgatggaacgtatgcatcgtatgactgctttagatccactgtttatcacggttacttggggagcaggtggtactactgcggaaaagactctgacattagcttccttggcacagcagacactaaatataccagtttgtatgcatttgacctgtacaaacacagaaaaagccatcattgatgatgcgctggatagatgttataatgcaggaatcaggaatattttggctcttcgaggtgacccacctattggggaagattggctagattctcaatcgaacgaatcaccttttaaatatgcggttgatttagttcgttatatcaagcaaagctacggagacaagttctgcgtcggtgttgcagcatatccagaaggtcattgtgaaggtgaagcagaaggtcacgagcaagacccattgaaggatttggtatatttaaaagaaaaagttgaagctggggccgattttgtgataacacaactgttttacgacgttgaaaaattcttaacttttgaaatgctatttcgggaacggatttcgcaagatttgccccttttccctgggttgatgcctattaactcctatctgcttttccacagagcagcaaagttatcacatgcatctattccacctgcaatactgagtaggttccccccagaaatccaatcggatgataatgccgtgaagtccattggtgtggacattcttatcgaattgattcaggaaatatatcaaagaacatctggtagaattaaagggtttcatttctatacattaaatttggaaaaggctattgctcaaattgtctcgcaatctcccgtcttatcccatatcgtaaatgaatctagcgaagaagagggagaagatgaaaccagtggcgaaataggaagcatagaaaatgtgccaatagaagatgctgacggggatattgtgttggatgattcgaatgaagaaactgtagcaaaccggaaaaggagaaggcattcaagtcttgattcggccaagttgattttcaatagggctatcgtcactgaaaaaggcttacgctataataatgagaatggttccatgccatctaaaaaggctttaatatctatttctaaaggtcacggaactttgggtcgtgatgccacttgggatgagttccccaatggtagatttggtgactccaggtctcccgcatatggtgaaatagacggttatgggccatccatcaaggtaagcaaaagcaaagcgcttgaactatggggtataccaaagacaattggcgatttaaaagatatttttataaaatatttggaaggttcaacggatgcgattccctggtctgacctgggtttatcagctgaaacggcgttaatacaagaagaactaatccaactaaactatcgcggatatttgactttggcatcgcaacctgccacaaatgctacattgagtagtgataaaatattcggctgggggcccgcgaaagggaggttgtatcagaaggcattcgtagaaatgtttattcatagacagcaatgggaaacaactttgaaacccaagctagaccattacgggcgtcggaaattcagttattacgcgggcgattcatctggttcatttgaaacgaacctagacccgcacagctctagcgttgtaacatggggtgtttttcccaacagtccggtcaaacagactacaatcattgaagaagagtcattcaaggcatggagagatgaagcgtttagtatctggtccgagtgggccaagttatttccaaggaacaccccagccaatattcttctaagactagtgcataaagactactgtcttgtctcaattgttcatcacgacttcaaagaaaccgacgagctatgggaaatgttactcgaccaagcctaa

SEQ ID NO: 11386 - DNA, 1974 bp, Artificial Sequence
  Description of Artificial Sequence: Synthetic polynucleotide
atgtccatcagagatttatatcatgcgagggcttccccttttatatctttagaattcttccctccaaagactgaattagggacgagaaatttgatggaacgtatgcatcgtatgactgctttagatccattatttatcacggttacttggggagcaggtggtactactgcggaaaagactttgacattagcttccttggcacagcagacattaaatataccagtttgtatgcatttgacctgtacaaacacagaaaaagccatcattgatgatgcgttggatagatgttataatgcaggaatcaggaatattttggctcttcgtggtgacccacctattggggaagattggcttgattctcaaagtaacgaatctccttttaaatatgcggttgatttagttcgttatatcaagcaaagctacggagacaagttctgcgtcggtgttgcagcatatccagaaggtcattgtgaaggtgaagcagaaggtcacgagcaagacccattgaaggatttggtatatttaaaagaaaaagttgaagctggggccgattttgtgataacacaattattttacgacgttgaaaaattcttaacttttgaaatgttatttagagaaagaatttctcaagatttgccccttttccctgggttgatgcctattaactcctatttacttttccacagagcagcaaagttatctcatgcatctattccacctgcaatattgagtaggttccccccagaaatccaatctgatgataatgccgtgaagtccattggtgtggacattcttatcgaattgattcaggaaatatatcaaagaacatctggtagaattaaagggtttcatttctatacattaaatttggaaaaggctattgctcaaattgtctctcaatctcccgtcttatcccatatcgtaaatgaatctagcgaagaagagggagaagatgaaaccagtggcgaaataggaagcatagaaaatgtgccaatagaagatgctgacggggatattgtgttggatgattctaatgaagaaactgtagcaaacagaaaaaggagaaggcattctagtcttgattctgccaagttgattttcaatagggctatcgtcactgaaaaaggcttacgctataataatgagaatggttccatgccatctaaaaaggctttaatatctatttctaaaggtcacggaactttgggtcgtgatgccacttgggatgagttccccaatggtagatttggtgactccaggtctcccgcatatggtgaaatagacggttatgggccatccatcaaggtaagcaaaagcaaagcgcttgaattatggggtataccaaagacaattggcgatttaaaagatatttttataaaatatttggaaggttctacggatgcgattccctggtctgacttgggtttatctgctgaaacggcgttaatacaagaagaattgatccaattgaactatcgcggatatttgactttggcatctcaacctgccacaaatgctacattgagtagtgataaaatattcggctgggggcccgcgaaagggaggttgtatcagaaggcattcgtagaaatgtttattcatagacagcaatgggaaacaactttgaaacccaagttggaccattacgggcgtcgtaaattcagttattacgcgggcgattcttctggttcttttgaaacgaacttggacccgcacagctctagcgttgtaacatggggtgtttttcccaacagtccggtcaaacagactacaatcattgaagaagagagtttcaaggcatggagagatgaagcgtttagtatctggtccgagtgggccaagttatttccaaggaacaccccagccaatattcttttgagattagtgcataaagactactgtcttgtctctattgttcatcacgacttcaaagaaaccgacgagttatgggaaatgttactcgaccaagcctga

SEQ ID NO: 11387 - DNA, 3303 bp, Saccharomyces cerevisiae
atgtctcagttattttatcagggcgactctgatgatgagctccaggaggaacttacgaggcagacaactcaagcatctcaaagttctaaaattaaaaatgaagatgaacccgacgactccaatcatcttaatgaggtggaaaatgaagatagcaaagttttagatgacgatgcagtgttataccctcttatacctaatgagccagatgacatagaaacgtctaagcccaatattaacgatattaggccagttgatattcaattgactttaccattgccgtttcagcaaaaagtggtagagaattcattaattactgaagatgcattaatcataatggggaaaggactaggattgcttgatattgtggccaatttattgcatgttttagctacaccaacatccattaacggacaactaaagcgagcgctcgtcctagtgttgaatgcaaaacctatagataatgtaagaatcaaggaggccttagaagagctgtcgtggttctctaatactgggaaggacgacgacgatactgctgtcgagagcgatgatgaactttttgaaaggccttttaacgtagttaccgcggactcgctgagcattgaaaagagaagaaagctatatatttctggcggaatcttgagcattacttctagaattctcattgtggatctcttatccggcattgttcacccaaatagggttacgggtatgctggtattgaatgcagactcacttcgacataattcgaatgaatcgtttatattagagatttacaggtctaaaaatacttggggttttattaaagccttttctgaagcaccagagacgtttgtcatggaattttcacccctcaggacgaaaatgaaagaattacggctaaagaacgttttgctatggccgaggttcagggtagaggtctcttcctgtttgaatgccactaataagacgtcacacaataaagtcattgaagtcaaggtctccttaacaaattccatgtctcagatacagtttggcttgatggaatgtttgaaaaaatgtattgctgagttaagcagaaaaaatcctgaactagctctggactggtggaatatggaaaatgtcctggatataaactttatcaggtcaattgactcggtgatggtgccgaactggcaccgaatttcttatgaatcaaaacaactggttaaggatataagattcctacgccaccttttaaagatgctcgtaacttcagacgcagttgacttttttggagagattcaattaagtttggatgccaataaaccgtcagtatcccgaaaatacagcgaatcaccgtggctattggtcgatgaggcacaattagtcatatcgtatgcgaagaaaagaatattttacaaaaatgaatatactttagaagaaaatccaaaatgggaacaacttattcatatattacatgatatttcacatgagagaatgaccaatcaccttcaggggcctactttagttgcctgttccgacaaccttacatgtttagaactagcaaaggtcttgaatgcctcaaacaaaaaaagaggagtacgtcaagtgcttctgaataaattgaaatggtacagaaaacagagggaggaaacgaaaaaattggtcaaagaagtgcaaagtcaggacacttttccagagaatgcaacattaaatgtaagctcgacattttccaaagaacaagtgaccacgaaaagaagaaggacaagaggtgcttcacaagttgcggccgttgaaaagctaaggaatgcaggtaccaatgtagatatggaggtggtttttgaggatcataagttatctgaagaaattaagaagggaagcggtgatgatttggatgacggtcaggaagaaaatgccgcaaacgattcaaagatttttgaaatacaagaacaggaaaatgaaatccttatcgatgatggggatgctgaatttgacaacggagaattagagtatgtgggcgaccttccgcagcacatcacaacccatttcaataaggatttatgggcagaacattgcaacgagtatgaatatgttgatcgtcaggacgaaattttaatctctacgtttaaaagtctcaatgacaattgctcattgcaggagatgatgccctcttacattataatgtttgaaccagatatatcgtttatcaggcagattgaagtttataaggccatagtgaaggatttgcaaccaaaagtatacttcatgtactacggtgaaagtattgaagagcaaagtcatttgactgctatcaagagagagaaagatgctttcacaaagttgattagagagaatgcaaatctgtcccatcactttgaaacgaatgaagatctttctcactacaaaaatttagctgaaaggaagttgaagctttcaaaattacgaaaatctaataccagaaatgcgggtgggcagcagggattccataatcttactcaggatgtcgtcattgtggatacacgtgagtttaatgcctcattaccaggcttactctaccgatatggcataagggttattccttgtatgttgacagtcggcgattatgtgataactcctgatatttgtctcgaaagaaaatcgatttctgacttaattgggtcattacagaataacagattagccaaccaatgtaaaaaaatgttaaaatactatgcatatccgacactattgattgagtttgatgaaggacagtcgttttctttagaaccttttagtgaacgtagaaattataagaataaagacatatcaactgttcatcctatatcaagcaagttatcccaggatgaaattcagctaaaactagccaaattagtattgcggtttcccactttaaagattatatggtcttcctcacccctgcaaactgtaaatataatcctagagttgaaattaggacgtgagcaacctgaccctagtaatgcagttatattgggaacgaataaagttagatcggattttaatagcactgcaaagggcctgaaggatggtgataacgagtctaaattcaagagactgttgaatgttcctggagtgtcaaaaattgattatttcaatctccgcaaaaagatcaagagcttcaataagcttcaaaagctttcatggaatgagattaatgaacttattaatgacgaagatttgacggatagaatatactacttcttgagaacagaaaaagaagaacaagaacaagagtcaacagatgaaaatcttgaatctcctggtaagaccactgatgataacgctttacatgatcatcataatgatgttcctgaagcacctgtgtaa

SEQ ID NO: 11388 - DNA, 3303 bp, Artificial Sequence
  Description of Artificial Sequence: Synthetic polynucleotide
atgtctcagttattttatcagggcgactctgatgatgagctccaggaggaacttacgaggcagacaactcaagcatctcaaagttctaaaattaaaaatgaagatgaacccgacgactccaatcatcttaatgaggtggaaaatgaagatagcaaagttttagatgacgatgcagtgttataccctcttatacctaatgagccagatgacatagaaacgtctaagcccaatattaacgatattaggccagttgatattcaattgactttaccattgccgtttcagcaaaaagtggtagagaattctttaattactgaagatgcattaatcataatggggaaaggacttggattgcttgatattgtggccaatttattgcatgttttagctacaccaacatccattaacggacaattgaagagagcgctcgtcttggtgttgaatgcaaaacctatagataatgtaagaatcaaggaggccttagaagagttatcttggttctctaatactgggaaggacgacgacgatactgctgtcgagagcgatgatgaactttttgaaaggccttttaacgtagttaccgcggactctttaagcattgaaaagagaagaaagctttatatttctggcggaatcttgagcattacttctagaattctcattgtggatctcttatccggcattgttcacccaaatagggttacgggtatgttggtattgaatgcagactctcttcgtcataatagtaatgaaagttttatattagagatttacaggtctaaaaatacttggggttttattaaagccttttctgaagcaccagagacgtttgtcatggaattttctcccctcaggacgaaaatgaaagaattaaggttaaagaacgttttgttatggccgaggttcagggtagaggtctcttcctgtttgaatgccactaataagacgagccacaataaagtcattgaagtcaaggtctccttaacaaattccatgtctcagatacagtttggcttgatggaatgtttgaaaaaatgtattgctgagttaagcagaaaaaatcctgaattggctttggactggtggaatatggaaaatgtcttggatataaactttatcaggtctattgactctgtgatggtgccgaactggcacagaatttcttatgaaagtaaacaattggttaaggatataagattcttgcgccaccttttaaagatgctcgtaacttctgacgcagttgacttttttggagagattcaattaagtttggatgccaataaaccgtctgtatccagaaaatacagcgaatctccgtggttattggtcgatgaggcacaattagtcatatcttatgcgaagaaaagaatattttacaaaaatgaatatactttagaagaaaatccaaaatgggaacaacttattcatatattacatgatatttctcatgagagaatgaccaatcaccttcaggggcctactttagttgcctgttccgacaaccttacatgtttagaattggcaaaggtcttgaatgcctccaacaaaaaaagaggagtacgtcaagtgcttttgaataaattgaaatggtacagaaaacagagggaggaaacgaaaaaattggtcaaagaagtgcaaagtcaggacacttttccagagaatgcaacattaaatgtaagctctacattttccaaagaacaagtgaccacgaaaagaagaaggacaagaggtgcttctcaagttgcggccgttgaaaagttaaggaatgcaggtaccaatgtagatatggaggtggtttttgaggatcataagttatctgaagaaattaagaagggaagcggtgatgatttggatgacggtcaggaagaaaatgccgcaaacgattctaagatttttgaaatacaagaacaggaaaatgaaatccttatcgatgatggggatgctgaatttgacaacggagaattagagtatgtgggcgaccttccgcagcacatcacaacccatttcaataaggatttatgggcagaacattgcaacgagtatgaatatgttgatcgtcaggacgaaattttaatctctacgtttaaaagtctcaatgacaattgctctttgcaggagatgatgccctcttacattataatgtttgaaccagatatatcctttatcaggcagattgaagtttataaggccatagtgaaggatttgcaaccaaaagtatacttcatgtactacggtgaaagtattgaagagcaaagtcatttgactgctatcaagagagagaaagatgctttcacaaagttgattagagagaatgcaaatttatcccatcactttgaaacgaatgaagatctttctcactacaaaaatttagctgaaaggaagttgaagctttctaaattaagaaaatctaataccagaaatgcgggtgggcagcagggattccataatcttactcaggatgtcgtcattgtggatacacgtgagtttaatgcctctttaccaggcttactctacagatatggcataagggttattccttgtatgttgacagtcggcgattatgtgataactcctgatatttgtctcgaaagaaaatccatttctgacttaattgggtctttacagaataacagattagccaaccaatgtaaaaaaatgttaaaatactatgcatatccgacattattgattgagtttgatgaaggacagtctttttctttagaaccttttagtgaacgtagaaattataagaataaagacatatctactgttcatcctatatctagcaagttatcccaggatgaaattcagttgaaattggccaaattagtattgagatttcccactttaaagattatatggtcttcctctcccttgcaaactgtaaatataatcttggagttgaaattaggacgtgagcaacctgaccctagtaatgcagttatattgggaacgaataaagttagaagtgattttaatagcactgcaaagggcttgaaggatggtgataacgagtctaaattcaagagattattgaatgttcctggagtgtctaaaattgattatttcaatctccgcaaaaagatcaagagcttcaataagcttcaaaagctttcttggaatgagattaatgaacttattaatgacgaagatttgacggatagaatatactacttcttgagaacagaaaaagaagaacaagaacaagagtctacagatgaaaatcttgaatctcctggtaagaccactgatgataacgctttacatgatcatcataatgatgttcctgaagcacctgtgtga

SEQ ID NO: 11389 - DNA, 564 bp, Saccharomyces cerevisiae
atgttatataacaaagagcagggaacaagcggcgctagtagctctggtcgtagaacgaaattccacttcgatcgttttgtacaaatggttctgttcattgccgctaatcccaattattgctgttcagtagccagtatcccgaaatctggtgtcacgccagatttaaaaagagcagatattcttgaacagaagatcaaaagcttaaatagtgcgctgagtccaaaattgaaggaagaaagtcgtcttggtgggcctttgcataacccctctattctaccagccccatctttttcatcactaccaatatcatccaatggaaagaaatctttagcaggatatagacctaaaagtaggaagaaacaaactatactccccaacggtcaaccaaaagagtgcgccacttgtggtgacacctggacttctcagtggagaagtggacctaatggaaatgttgagctatgtagtcgatgtggcatagcatataggaaaaaaatggagaaaaaaatacgatcgcaacaatcctccgatgatggtactaaaaattttatatttaaaaataaatag

SEQ ID NO: 11390 - DNA, 564 bp, Artificial Sequence
  Description of Artificial Sequence: Synthetic polynucleotide
atgttatataacaaagagcagggaacaagcggcgctagtagctctggtcgtagaacgaaattccacttcgatcgttttgtacaaatggttttgttcattgccgctaatcccaattattgctgttctgtagccagtatcccgaaatctggtgtcacgccagatttaaaaagagcagatattcttgaacagaagatcaaaagcttaaatagtgcgttaagtccaaaattgaaggaagaaagtcgtcttggtgggcctttgcataacccctctattttaccagccccatctttttcttctttaccaatatcttccaatggaaagaaatctttagcaggatatagacctaaaagtaggaagaaacaaactatactccccaacggtcaaccaaaagagtgcgccacttgtggtgacacctggacttctcagtggagaagtggacctaatggaaatgttgagctctgtagtagatgtggcatagcatataggaaaaaaatggagaaaaaaataaggtctcaacaatcctccgatgatggtactaaaaattttatatttaaaaataaatga

SEQ ID NO: 11391 - DNA, 1866 bp, Saccharomyces cerevisiae
atgtcagttgaagtagataagcaccggaacacactacagtatcataaaaagaacccttactcccctttattctccccaatttctacatataggtgttatcctcgggtattgaacaatccctccgagtctagaagatcagccagttttagtggtatttataaaaaaagaaccaatacgtcaagattcaattatttaaacgaccgccgtgttttatcaatggaagaatcaatgaaagatgggtcagatagagctagtaaagctggttttataggaggcataagagaaactctttggaactcaggtaagtacttatggcacacatttgtgaaaaacgaacctcgcaattttgatggttctgaagtagaagcaagtggtaacagcgacgttgagagcagaagttctggaagtaggagcagtgacgtaccatatggtctacgtgaaaattattcctcggatacaagaaaacacaaattcgatacgtcgacgtgggccttaccaaataaaaggagaagaatcgaaagtgaaggtgtggggacaccttcaacctcaccaatcagctctttggcttctcaaaaaagcaattgtgatagtgacaatagcataactttttcgagagatccttttggttggaataagtggaaaacaagtgctattggttctaactcagaaaataacacttctgatcagaaaaatagctacgacaggcgacagtatgggacagcctttattagaaagaaaaaagttgcaaaacagaacattaacaatactaaactggtgtcgagagcacaatctgaggaagtaacatatttacgacaaatattcaacggagaatataaagttccaaaaatattaaaagaagaaagagaaagacagttaaaattaatggatatggataaggaaaaagacactggcttaaaaaagtctataatcgacttaactgaaaagatcaaaacaattttaattgagaacaacaagaacagactacagacaagaaatgaaaatgatgatgatttagtatttgttaaagaaaaaaagatatcttctttggaaaggaaacataaggattacttaaatcaaaagttgaagtttgatagatctatattagagtttgagaaagacttcaaaagatataacgaaattttaaatgaaagaaagaagattcaagaagatcttaaaaaaaagaaagaacaattggccaagaagaaacttgttcctgaattaaatgaaaaagacgatgaccaagtacaaaaagctttggcatctagagaaaatactcagttaatgaatagagataatatagagataacagtacgtgattttaagaccttggcaccacgaagatggctaaatgacactatcattgagttttttatgaaatacattgaaaaatctacccctaatacagtggcgtttaattcatttttctataccaatttatcagaaaggggttatcaaggcgtccggaggtggatgaagagaaagaagacacaaattgataaacttgataaaatctttacaccaataaatttgaaccaatcccactgggcgttgggcataattgatttaaaaaagaaaactataggttacgtagattcattatcgaatggtccaaatgctatgagtttcgctatactgactgacttgcaaaaatatgttatggaggaaagtaagcatacaataggagaagactttgatttgattcatttagattgtccgcagcaaccaaatggctacgactgtggaatatatgtttgtatgaatactctctatggaagtgcagatgcgccattggattttgattataaagatgcgattaggatgagaagatttattgcccatttgattttaaccgacgctttaaaatag

SEQ ID NO: 11392 - DNA, 1866 bp, Artificial Sequence
  Description of Artificial Sequence: Synthetic polynucleotide
atgtctgttgaagtagataagcacagaaacacattacagtatcataaaaagaacccttactcccctttattctccccaatttctacatataggtgttatcctagagtattgaacaatccctccgagtctagaagatctgccagttttagtggtatttataaaaaaagaaccaatacgtccagattcaattatttaaacgaccgccgtgttttatctatggaagaaagtatgaaagatgggtctgatagagctagtaaagctggttttataggaggcataagagaaactctttggaacagtggtaagtacttatggcacacatttgtgaaaaacgaacctcgcaattttgatggttctgaagtagaagcaagtggtaacagcgacgttgagagcagaagttctggaagtaggagcagtgacgtaccatatggtttacgtgaaaattattccagtgatacaagaaaacacaaattcgatacgtccacgtgggccttaccaaataaaaggagaagaatcgaaagtgaaggtgtggggacaccttctacctctccaatcagctctttggcttctcaaaaaagcaattgtgatagtgacaatagcataactttttccagagatccttttggttggaataagtggaaaacaagtgctattggttctaactctgaaaataacacttctgatcagaaaaatagctacgacaggaggcagtatgggacagcctttattagaaagaaaaaagttgcaaaacagaacattaacaatactaaattagtgtccagagcacaatctgaggaagtaacatatttaagacaaatattcaacggagaatataaagttccaaaaatattaaaagaagaaagagaaagacagttaaaattaatggatatggataaggaaaaagacactggcttaaaaaagtctataatcgacttaactgaaaagatcaaaacaattttaattgagaacaacaagaacagattacagacaagaaatgaaaatgatgatgatttagtatttgttaaagaaaaaaagatatcttctttggaaaggaaacataaggattacttaaatcaaaagttgaagtttgatagatctatattagagtttgagaaagacttcaaaagatataacgaaattttaaatgaaagaaagaagattcaagaagatcttaaaaaaaagaaagaacaattggccaagaagaaacttgttcctgaattaaatgaaaaagacgatgaccaagtacaaaaagctttggcatctagagaaaatactcagttaatgaatagagataatatagagataacagtacgtgattttaagaccttggcaccaagaagatggttaaatgacactatcattgagttttttatgaaatacattgaaaaatctacccctaatacagtggcgtttaattcttttttctataccaatttatctgaaaggggttatcaaggcgtcagaaggtggatgaagagaaagaagacacaaattgataaacttgataaaatctttacaccaataaatttgaaccaatcccactgggcgttgggcataattgatttaaaaaagaaaactataggttacgtagattctttatccaatggtccaaatgctatgagtttcgctatattgactgacttgcaaaaatatgttatggaggaaagtaagcatacaataggagaagactttgatttgattcatttagattgtccgcagcaaccaaatggctacgactgtggaatatatgtttgtatgaatactctctatggaagtgcagatgcgccattggattttgattataaagatgcgattaggatgagaagatttattgcccatttgattttaaccgacgctttaaaatga

SEQ ID NO: 11393 - DNA, 2508 bp, Saccharomyces cerevisiae
atgctatttggtattaaactggctaacgacgtatatcctccctggaaggattcatatatcgactatgaaaggttgaagaaattactaaaggaaagcgtcatacatgatggccgtagttccgtggatagttggtccgaaaggaatgaatctgattttgtggaggccttggataaagaactagaaaaggtttacacatttcaaatttccaaatataatgctgtcttgcgaaaattagatgatttagaggaaaacactaaatcagctgaaaaaatccaaaaaataaattctgagcagttcaaaaacaccttagaagaatgtctagatgaggctcaaagattggataactttgacaggttaaattttactgggtttatcaagattgtgaagaaacacgataaattacatccaaactatccttctgtaaagtctcttttacaagtcagattgaaagaacttcctttcaacaattcagaagagtattctcccttgttgtataggatctcatatctgtacgagttcttgagatcaaattatgatcatccaaatacggtgtctaaatcattagcaagtacttctaaattatcacatttttctaaccttgaagacgcaagttttaaaagctacaagttttgggttcatgatgataatataatggaggttaaggctagaatcttaaggcatctacctgctttggtttatgcgtcggttccaaatgaaaatgacgatttcgtcgataatctagaatcagatgtccgcgtacaacctgaagcgcgcttgaatattggttcaaagagtaacagcctttctagtgatggtaatagcaaccaagatgttgaaattggaaaatcaaagagcgttattttcccacagtcatatgatccaacaatcactacattatatttcgacaacgatttttttgatttgtacaataacagattgttgaaaatcagcggtgcacctacgctgagattaagatggatcggtaaactgctagacaaacctgacatatttttggaaaagagaacttttacagaaaataccgaaactggtaattcaagttttgaagaaatcagattgcaaatgaaagccaaattcatcaacaattttatttttaaaaatgatcccagttacaaaaactatttaattaatcaactaagagaaaggggtactcaaaaggaggaactggaaaaactttctagagactttgataacatccaaaactttattgttgaggagaagttgcagccagttttgagagctacctataatagaactgctttccaaattcctggagatcaaagtattagagtcactatcgattccaatatcatgtacattagagaggattctttggacaaaaataggcccattaggaaccctgagaattggcaccgtgacgatattgattccaatattcccaacccattgaggtttttaagagcaggagaatattcgaagttcccctattctgtaatggagattaaggttataaaccaagataattctcaaatgcctaattatgagtggattaaagatttaactaattcacatttagttaacgaagttccaaaattttctttgtacttgcaaggtgtggcttcactgtttggtgaagacgataaatatgtcaacattttgccattctggttgcccgatttagaaaccgacatcagaaagaaccctcaggaggcttacgaagaagagaagaaaactttacaaaaacaaaagagcattcatgataaacttgataatatgagaaggttatccaaaatctctgtaccagatggaaagaccactgaaagacaagggcaaaaagatcagaatactcgccacgttattgcagatttagaagatcacgaatcatcagatgaagaaggtactgcattgcccaagaaatctgcagtcaaaaaagggaagaaattcaaaacgaatgcagctttcttgaaaattcttgctggaaaaaatatttcagaaaatggaaatgatccatactccgacgatacagacagtgcctcttctttccaattacctccgggagttaaaaaaccagttcaccttttgaaaaatgccggtcctgtcaaagttgaggcaaaagtttggctcgccaatgaacgtacattcaatagatggttaagtgtaaccacattgctgagtgtattgaccttttctatctataattcagtgcaaaaagccgaatttccacaactagctgatctgttggcctatgtatatttctttttgactttgttttgcggagtatgggcttatagaacctacttaaaaagattaactcttattaaaggtagaagtggtaagcatttggatgcacctgtgggacctattttggttgcagttgtattaatcgttaccttggttgttaactttagtgtggcttttaaagaggccgctaggagggaaagaggattagtaaacgtttcctcccagccttcgttaccccgtacactaaaaccaattcaagattttatcttcaatttggttggggaataa

SEQ ID NO: 11394 - DNA, 2508 bp, Artificial Sequence
  Description of Artificial Sequence: Synthetic polynucleotide
atgttatttggtattaaattggctaacgacgtatatcctccctggaaggattcttatatcgactatgaaaggttgaagaaattattgaaggaaagcgtcatacatgatggccgtagttccgtggatagttggtccgaaaggaatgaatctgattttgtggaggccttggataaagaattggaaaaggtttacacatttcaaatttccaaatataatgctgtcttgagaaaattagatgatttagaggaaaacactaaatctgctgaaaaaatccaaaaaataaattctgagcagttcaaaaacaccttagaagaatgtttggatgaggctcaaagattggataactttgacaggttaaattttactgggtttatcaagattgtgaagaaacacgataaattacatccaaactatccttctgtaaagtctcttttacaagtcagattgaaagaacttcctttcaacaattctgaagagtattctcccttgttgtataggatcagttatttgtacgagttcttgagatctaattatgatcatccaaatacggtgtctaaatctttagcaagtacttctaaattatctcatttttctaaccttgaagacgcaagttttaaaagctacaagttttgggttcatgatgataatataatggaggttaaggctagaatcttaaggcatttacctgctttggtttatgcgtccgttccaaatgaaaatgacgatttcgtcgataatttggaaagtgatgtccgcgtacaacctgaagcgcgcttgaatattggttccaagagtaacagcctttctagtgatggtaatagcaaccaagatgttgaaattggaaaatccaagagcgttattttcccacagagttatgatccaacaatcactacattatatttcgacaacgatttttttgatttgtacaataacagattgttgaaaatcagcggtgcacctacgttgagattaagatggatcggtaaattattagacaaacctgacatatttttggaaaagagaacttttacagaaaataccgaaactggtaatagtagttttgaagaaatcagattgcaaatgaaagccaaattcatcaacaattttatttttaaaaatgatcccagttacaaaaactatttaattaatcaattgagagaaaggggtactcaaaaggaggaattggaaaaactttctagagactttgataacatccaaaactttattgttgaggagaagttgcagccagttttgagagctacctataatagaactgctttccaaattcctggagatcaaagtattagagtcactatcgattccaatatcatgtacattagagaggattctttggacaaaaataggcccattaggaaccctgagaattggcaccgtgacgatattgattccaatattcccaacccattgaggtttttaagagcaggagaatattccaagttcccctattctgtaatggagattaaggttataaaccaagataattctcaaatgcctaattatgagtggattaaagatttaactaattctcatttagttaacgaagttccaaaattttctttgtacttgcaaggtgtggcttctttatttggtgaagacgataaatatgtcaacattttgccattctggttgcccgatttagaaaccgacatcagaaagaaccctcaggaggcttacgaagaagagaagaaaactttacaaaaacaaaagagcattcatgataaacttgataatatgagaaggttatccaaaatctctgtaccagatggaaagaccactgaaagacaagggcaaaaagatcagaatactcgccacgttattgcagatttagaagatcacgaatcttctgatgaagaaggtactgcattgcccaagaaatctgcagtcaaaaaagggaagaaattcaaaacgaatgcagctttcttgaaaattcttgctggaaaaaatatttctgaaaatggaaatgatccatactccgacgatacagacagtgcctcttctttccaattacctccgggagttaaaaaaccagttcaccttttgaaaaatgccggtcctgtcaaagttgaggcaaaagtttggctcgccaatgaacgtacattcaatagatggttaagtgtaaccacattgttaagtgtattgaccttttctatctataattctgtgcaaaaagccgaatttccacaattggctgatttattggcctatgtatatttctttttgactttgttttgcggagtatgggcttatagaacctacttaaaaagattaactcttattaaaggtagaagtggtaagcatttggatgcacctgtgggacctattttggttgcagttgtattaatcgttaccttggttgttaactttagtgtggcttttaaagaggccgctaggagggaaagaggattagtaaacgtttcctcccagccttctttaccccgtacattaaaaccaattcaagattttatcttcaatttggttggggaatga

SEQ ID NO: 11395 - DNA, 1110 bp, Saccharomyces cerevisiae
atggattttacgtctgatacgacgaattcgcacgacacatcgaattcgcatttaagtctggaagacgctgtgggtacacatcatgctggtgaagcagatgtaaacattgatggggacgagaagcaacaactatcgctattagatgatgatcaggtacgcgcactgaagctacaggaggagaaggatgcgctgttgacaaggagaaatactcttttacaagagatccagacgtaccaaaatatcttgatgaaggaaaataacagtaagactaaaaatggtgatatcctccaaaacgatatcacacaggattttcttaatctaatctcgatctcatcctctaatcctaattcggcgataagtgaccgcaagcgggtcgagaggatcaatgggctaactaacttgcagaaggaactagtaacaaaatacgacacgttacctttgttaaatatgaatctacggctaagttatttgagagaccacacatacccgcatcttcaagtttctgtgcaatcaagagacagagtacataacgatgggattgaagttttggtggtcaattataaattctgcagaaacacgatgaatccttttgaaattcagttcaaaatgttctataaatttgaagattccacactgctgaagtgggaaatcttgcgaatttccacaaacgttagactgaaggccaagcaattactggcaacacgtaacttccagaagtgtctattaagcctttatgagtttgataagatcaagtccaaaaaaactggaattttccaaaatttgattaatttattgaaaaggaaaaccaggtgttatctaatgaataatagtgactcattaattgtggaaagagttattagagaaggaagactcacgacgataaaattgcagataaatttcatcattacaatgcccggtgagagaggcaaacctcgtaactgttttctgcccatgagtaaaatttcaatagcgctatggaaggggggagaaagatttaaccagatagatttggacgagatatgctacggacttatcaaggaatatggtgtgaaaaccgggttaaaggagatctgcaacgtttgcctattcccggacatgtacgccaggtga

SEQ ID NO: 11396 - DNA, 1110 bp, Artificial Sequence
  Description of Artificial Sequence: Synthetic polynucleotide
atggattttacgtctgatacgacgaattctcacgacacaagtaattctcatttaagtttagaagacgctgtgggtacacatcatgctggtgaagcagatgtaaacattgatggggacgagaagcaacaattaagtttgttagatgatgatcaggtacgcgcattgaagttacaggaggagaaggatgcgttattgacaaggagaaatactcttttacaagagatccagacgtaccaaaatatcttgatgaaggaaaataacagtaagactaaaaatggtgatatcctccaaaacgatatcacacaggattttcttaatttgatctccatctcttcctctaatcctaattctgcgataagtgaccgcaagcgtgtcgagaggatcaatgggttgactaacttgcagaaggaattggtaacaaaatacgacacgttacctttgttaaatatgaatttaaggttgagttatttgagagaccacacatacccgcatcttcaagtttctgtgcaatctagagacagagtacataacgatgggattgaagttttggtggtcaattataaattctgcagaaacacgatgaatccttttgaaattcagttcaaaatgttctataaatttgaagattccacattattgaagtgggaaatcttgagaatttccacaaacgttagattaaaggccaagcaattattggcaacacgtaacttccagaagtgtcttttaagcctttatgagtttgataagatcaagtccaaaaaaactggaattttccaaaatttgattaatttattgaaaaggaaaaccaggtgttatttaatgaataatagtgactctttaattgtggaaagagttattagagaaggaagactcacgacgataaaattgcagataaatttcatcattacaatgcccggtgagagaggcaaacctcgtaactgttttttgcccatgagtaaaatttctatagcgctttggaaggggggagaaagatttaaccagatagatttggacgagatatgctacggacttatcaaggaatatggtgtgaaaaccgggttaaaggagatctgcaacgtttgccttttcccggacatgtacgccaggtga

SEQ ID NO: 11397 - DNA, 1500 bp, Saccharomyces cerevisiae
atgggaggtgaagacgaaatattaagcacgatggaggattttgcggcagtttacgatgtcctggtaattggttgcgggcctggtggctttactgcagcgatgcaggcttcgcaagcaggcctgctcacagcatgtgttgaccagcgtgcctcgctggggggcgcctaccttgtagacggggcagtcccgtccaagaccttgttatatgagtcttatctttatcggctgctacaacagcaagaacttatcgagcaacgtggcacgcggctgtttcctgcaaaattcgatatgcaggcggcccagagtgcactcaaacataatatagaagagttgggcaatgtgtataaacgtgagctatctaaaaataatgttactgtgtataaaggcacggctgctttcaaagatcctcaccacgttgagattgcgcagcgcggcatgaaaccgttcatcgtagaggcgaaatatattgttgtggcgaccggatctgcggttattcagtgtcctggtgttgcaatagataatgacaagataatttcatctgataaggcattgtcactggattatataccttcacgttttactatcatgggaggaggtacaattggactagaaatcgcatgcatattcaataatttgggctctcgggttactatcgttgaatctcaaagcgagatctgtcaaaatatggacaatgagttggcttctgccacgaagaccctcttgcagtgtcagggtatagcttttcttttagacactagagtgcagctcgcggaagccgatgctgccggtcagctgaacatcaccttgcttaacaaggtgtcaaagaaaacatatgtacatcattgcgacgtcttgatggtttctattggtagacgtcccctgctaaaaggtttagatatttccagcattggtctagacgaacgggattttgtagaaaatgttgacgtacaaacccaaagtctgctaaagtaccctcatattaaacccataggagacgttacattgggccccatgctggcgctgaaagcggaagaacaagctataagggccattcaatcaataggctgtacaggctccgacggaacctcgaattgtggcttcccaccaaatgtgctgtactgtcagcctcagattggctgggtcggatacactgaggaggggttggcaaaggctcgcatcccatatcaaaaaggcagggttttgttctcacagaacgttagatataacacgttattaccacgggaagagaatactacagtttctcctttcattaaagttctgatagattctcgtgacatgaaaatactaggcgttcatatgataaacgacgatgcaaatgaattgctgtcgcaagcatcgatggcggtgtcgcttggccttaccgcccatgatgtctgtaaagtaccgttccctcatccgagcttatcggaatcgtttaagcaagccgtccagttggcaatggcaaatggaacatcacctggcgtacatgtccgggaatag

SEQ ID NO: 11398 - DNA, 1500 bp, Artificial Sequence
  Description of Artificial Sequence: Synthetic polynucleotide
atgggaggtgaagacgaaatattaagcacgatggaggattttgcggcagtttacgatgtcttggtaattggttgcgggcctggtggctttactgcagcgatgcaggcttctcaagcaggcttgctcacagcatgtgttgaccagcgtgccagtttagggggcgcctaccttgtagacggggcagtcccgtccaagaccttgttatatgagtcttatctttatagattattacaacagcaagaacttatcgagcaacgtggcacgcgtttgtttcctgcaaaattcgatatgcaggcggcccagagtgcactcaaacataatatagaagagttgggcaatgtgtataaacgtgagctttctaaaaataatgttactgtgtataaaggcacggctgctttcaaagatcctcaccacgttgagattgcgcagcgcggcatgaaaccgttcatcgtagaggcgaaatatattgttgtggcgaccggatctgcggttattcagtgtcctggtgttgcaatagataatgacaagataatttcttctgataaggcattgtctttagattatataccttctcgttttactatcatgggaggaggtacaattggattagaaatcgcatgcatattcaataatttgggctctagagttactatcgttgaatctcaaagcgagatctgtcaaaatatggacaatgagttggcttctgccacgaagaccctcttgcagtgtcagggtatagcttttcttttagacactagagtgcagctcgcggaagccgatgctgccggtcagttgaacatcaccttgcttaacaaggtgagcaagaaaacatatgtacatcattgcgacgtcttgatggtttctattggtagacgtcccttattgaaaggtttagatatttccagcattggtttggacgaaagagattttgtagaaaatgttgacgtacaaacccaaagtttattgaagtaccctcatattaaacccataggagacgttacattgggccccatgttggcgttgaaagcggaagaacaagctataagggccattcaaagtataggctgtacaggctccgacggaacctctaattgtggcttcccaccaaatgtgttatactgtcagcctcagattggctgggtcggatacactgaggaggggttggcaaaggctcgcatcccatatcaaaaaggcagggttttgttctctcagaacgttagatataacacgttattaccaagagaagagaatactacagtttctcctttcattaaagttttgatagattctcgtgacatgaaaatattgggcgttcatatgataaacgacgatgcaaatgaattgctttctcaagcatctatggcggtgtctcttggccttaccgcccatgatgtctgtaaagtaccgttccctcatccgagcttatctgaaagttttaagcaagccgtccagttggcaatggcaaatggaacatctcctggcgtacatgtcagagaatga

SEQ ID NO: 11399 - DNA, 3945 bp, Saccharomyces cerevisiae
atggatttctttaatttgaataataataataataataataatactactactactactactactaccaataacaataatactaataataataatactaataataataataatcctgctaataataccaataacaacaatagcacaggccatagtagtaatactaataacaatactaataacaacaatacgaataccggagccagtggtgtagacgattttcagaattttttcgacccaaaaccttttgaccagaatttggattccaacaataacaacagtaatagtaataacaatgataacaataacagtaacacggtagcctccagcacgaactttacttctccaacagcagtcgttaataatgccgctcctgctaatgttaccggtggaaaagctgctaatttcattcagaaccagtctccccaattcaattctccatatgactcaaacaattccaacacaaatttaaacagcctgtctcctcaggctattttagccaagaattcaatcattgattcttccaatttacctcttcaagctcaacaacagctatatggcggtaacaataataataatagcaccggaattgcgaacgataatgtaataacaccccattttatcaccaatgttcaatccatcagtcaaaattcctcatcttctactccgaacacaaactctaactctactccgaatgcaaatcaacaatttttgccattcaataacagtgcttccaataatggtaatttgacgtctaaccagcttatttctaattacgctgcttcaaattcaatggacagatcatcctctgcaagcaatgaatttgttccgaacacaagtgacaacaacaacaacagtaataaccataatatgcgtaataacagcaataataaaacgagcaataacaataatgtcactgccgtgcctgctgcaactcccgctaataccaataattcaacttcaaacgcaaatacagtgttctctgaaagagctgcaatgtttgccgctttgcagcaaaagcagcagcaacgttttcaggctctacagcagcagcagcagcagcaacaaaatcaacaacagcaaaatcaacaaccacaacagcaacaacagcaacaacagaatcccaaatttttgcagagtcaacggcagcaacaacaaagatctattttacaaagtctgaacccggcattacaagagaaaatatctactgaattgaataacaaacaatatgaactttttatgaaatctttgattgaaaactgtaaaaaaagaaatatgccgttacaatcaataccagaaatcggcaacagaaaaataaatcttttttatctttatatgttggttcaaaaattcggtggtgcagatcaagtaacaaggacccaacagtggtctatggtggcccaaaggctgcaaatttccgattaccaacaattagaatcaatctattttagaattttattaccttacgaaagacacatgatttcccaagaaggtataaaggaaactcaagcgaaaagaatattcttgcaacagttcttacaagaactattgaagaaagttcaacaacagcagcaggccgctgcattggccaatgccaacaataacattaatagtgcatcgtcagcaccaacccccgcggctcctggcgcgtccgttcctgctacagcagcaccaggaacagaagcagggatcgttccggtttcagcaaacactccaaaaagcttgaatagcaatattaatatcaacgtaaataataacaatattggccaacagcaagttaagaagccaagaaagcaaagagtgaaaaaaaagaccaaaaaggaattggaactagaacgtaaagaaagggaggattttcagaaacgacaacaaaaacttttagaggatcaacaaaggcaacagaaattgctattagagacaaaattacgtcaacaatatgaaatcgaactaaaaaaattgcctaaagtctacaagagatcaattgttaggaactacaaacccctaatcaaccgcctcaagcattacaatggttacgatatcaattacatctctaaaataggagagaaaatagattccaacaagccaatttttctcttcgcgccagagttaggtgcaattaatttacatgctttatcaatgtccctccaatcgaagaatcttggagaaataaacaccgccttgaacaccttgttggtcacaagcgctgactcgaacttaaaaatatctctggtcaaataccctgaattattagactccttggcaatactcggcatgaatttactgtcaaatttgtcacaaaatgttgttccataccatcgaaacacttctgactattattatgaggatgctggatcaaatcaatactatgttacccaacacgataaaatggttgataaaatttttgaaaaggtaaacaacaacgctacacttacaccgaatgattctaacgatgaaaaagtcactatcctggtagattctttaacaggtaatcaattgcccacccctactcctactgaaatggagcctgatctcgacactgaatgttttataagtatgcagtcgacatctcccgcagttaaacagtgggacttattgcctgaaccaataagattcctccctaaccaatttcctttgaaaattcacagaactccttatttgacttctttgaaaaaaatcaaggatgaaattgatgatccatttacaaaaataaataccagaggggcagaggatcccaaagttctgattaacgatcaactgtctaccatctcgatgattttgaggaatatttcattctccgataacaactccagaatcatgtcgagaaatttttacctaaagagatttatatctgatctactttggttagtcttaatccatccagaaaactttacatgcaataggaaaatactaaatttcaagaaggatttggttattgttttatcaaatatttctcatttattagagatcgcttcgtccattgattgcttgttaattcttattctagtcataagttttggtcaaccaaaactcaatccaatggcgtcttcgtcatcatttggctctgaatctttgaccttcaacgaattccagttgcaatggggaaaatatcaaactttcggtgtagatattttggccaaattattttcattggaaaaaccgaacctaaattatttcaaatcaatccttctgaacaaaaacacaggtaacaacctctatgatcgcaacagtaacaacaaccacaaggacaaaaagttgttacgaagacttttgaatttatacaatgataacaataaaaataataacaataggcacaacttgctaaatgatgtggtttcgtttttattttctgccataccgctgcagcaagtgttatcgcaatcagctgatccaagtttgctgatcgaccaattttctccggtaatttctcagagtctaactagcatcttagtcattgtacaaaaaatattgccgttatccaatgaagtatttgaaatcagtgagaataattcagacagtaacagtaacaataacggcaacaaagattctagcttcaatttcaacaagaatttaccatttgtgtggttgagctctgaagaaaatattggatctggactattgaagttaagtgagataatattgaatattaacaattccacaagtaagaatactttgttacagcaacaaaattattcaaaggtgctcctaccgtcaattaacatatcctgtgttcagttaatcaaatgtttggttgaaaaaagtatttgttttgaaaactgcctaaacaacgacccggaaatattaaaaaaaatagcatcgattccaaatttgttccccacggatttagaaattttccagttattcactaatccatcagttgatattcaaataataaaccagtatcaattactttacaatttaaaaaatgatatcctaaccaatttggaatga

SEQ ID NO: 11400 - DNA, 3945 bp, Artificial Sequence
  Description of Artificial Sequence: Synthetic polynucleotide
atggatttctttaatttgaataataataataataataataatactactactactactactactaccaataacaataatactaataataataatactaataataataataatcctgctaataataccaataacaacaatagcacaggccatagtagtaatactaataacaatactaataacaacaatacgaataccggagccagtggtgtagacgattttcagaattttttcgacccaaaaccttttgaccagaatttggattccaacaataacaacagtaatagtaataacaatgataacaataacagtaacacggtagcctccagcacgaactttacttctccaacagcagtcgttaataatgccgctcctgctaatgttaccggtggaaaagctgctaatttcattcagaaccagtctccccaattcaattctccatatgactccaacaattccaacacaaatttaaacagcttgtctcctcaggctattttagccaagaattccatcattgattcttccaatttacctcttcaagctcaacaacagttatatggcggtaacaataataataatagcaccggaattgcgaacgataatgtaataacaccccattttatcaccaatgttcaatccatcagtcaaaattcctcttcttctactccgaacacaaactctaactctactccgaatgcaaatcaacaatttttgccattcaataacagtgcttccaataatggtaatttgacgtctaaccagcttatttctaattacgctgcttctaattctatggacagaagttcctctgcaagcaatgaatttgttccgaacacaagtgacaacaacaacaacagtaataaccataatatgcgtaataacagcaataataaaacgagcaataacaataatgtcactgccgtgcctgctgcaactcccgctaataccaataattctacttctaacgcaaatacagtgttctctgaaagagctgcaatgtttgccgctttgcagcaaaagcagcagcaacgttttcaggctttacagcagcagcagcagcagcaacaaaatcaacaacagcaaaatcaacaaccacaacagcaacaacagcaacaacagaatcccaaatttttgcagagtcaaagacagcaacaacaaagatctattttacaaagtttgaacccggcattacaagagaaaatatctactgaattgaataacaaacaatatgaactttttatgaaatctttgattgaaaactgtaaaaaaagaaatatgccgttacaaagtataccagaaatcggcaacagaaaaataaatcttttttatctttatatgttggttcaaaaattcggtggtgcagatcaagtaacaaggacccaacagtggtctatggtggcccaaaggttacaaatttccgattaccaacaattagaaagtatctattttagaattttattaccttacgaaagacacatgatttcccaagaaggtataaaggaaactcaagcgaaaagaatattcttgcaacagttcttacaagaattattgaagaaagttcaacaacagcagcaggccgctgcattggccaatgccaacaataacattaatagtgcatcttctgcaccaacccccgcggctcctggcgcgtccgttcctgctacagcagcaccaggaacagaagcagggatcgttccggtttctgcaaacactccaaaaagcttgaatagcaatattaatatcaacgtaaataataacaatattggccaacagcaagttaagaagccaagaaagcaaagagtgaaaaaaaagaccaaaaaggaattggaattggaacgtaaagaaagggaggattttcagaaaagacaacaaaaacttttagaggatcaacaaaggcaacagaaattgttattagagacaaaattacgtcaacaatatgaaatcgaattgaaaaaattgcctaaagtctacaagagatctattgttaggaactacaaacccttaatcaaccgcctcaagcattacaatggttacgatatcaattacatctctaaaataggagagaaaatagattccaacaagccaatttttctcttcgcgccagagttaggtgcaattaatttacatgctttatctatgtccctccaatccaagaatcttggagaaataaacaccgccttgaacaccttgttggtcacaagcgctgactccaacttaaaaatatctttggtcaaataccctgaattattagactccttggcaatactcggcatgaatttattatccaatttgtctcaaaatgttgttccataccatagaaacacttctgactattattatgaggatgctggaagtaatcaatactatgttacccaacacgataaaatggttgataaaatttttgaaaaggtaaacaacaacgctacacttacaccgaatgattctaacgatgaaaaagtcactatccttgtagattctttaacaggtaatcaattgcccacccctactcctactgaaatggagcctgatctcgacactgaatgttttataagtatgcagagtacatctcccgcagttaaacagtgggacttattgcctgaaccaataagattcctccctaaccaatttcctttgaaaattcacagaactccttatttgacttctttgaaaaaaatcaaggatgaaattgatgatccatttacaaaaataaataccagaggggcagaggatcccaaagttttgattaacgatcaattatctaccatctctatgattttgaggaatatttctttctccgataacaactccagaatcatgagtagaaatttttacttgaagagatttatatctgatttactttggttagtcttaatccatccagaaaactttacatgcaataggaaaatattgaatttcaagaaggatttggttattgttttatccaatatttctcatttattagagatcgcttcttccattgattgcttgttaattcttattttagtcataagttttggtcaaccaaaactcaatccaatggcgtcttcttcttcttttggctctgaatctttgaccttcaacgaattccagttgcaatggggaaaatatcaaactttcggtgtagatattttggccaaattattttctttggaaaaaccgaacttgaattatttcaaatctatccttttgaacaaaaacacaggtaacaacctctatgatcgcaacagtaacaacaaccacaaggacaaaaagttgttaagaagacttttgaatttatacaatgataacaataaaaataataacaataggcacaacttgttgaatgatgtggtttcttttttattttctgccataccgttgcagcaagtgttatctcaatctgctgatccaagtttgttgatcgaccaattttctccggtaatttctcagagtttgactagcatcttagtcattgtacaaaaaatattgccgttatccaatgaagtatttgaaatcagtgagaataatagtgacagtaacagtaacaataacggcaacaaagattctagcttcaatttcaacaagaatttaccatttgtgtggttgagctctgaagaaaatattggatctggattattgaagttaagtgagataatattgaatattaacaattccacaagtaagaatactttgttacagcaacaaaattattccaaggtgctcttgccgtctattaacatatcctgtgttcagttaatcaaatgtttggttgaaaaaagtatttgttttgaaaactgcttgaacaacgacccggaaatattaaaaaaaatagcatctattccaaatttgttccccacggatttagaaattttccagttattcactaatccatctgttgatattcaaataataaaccagtatcaattactttacaatttaaaaaatgatatcttgaccaatttggaatga

SEQ ID NO: 11401 - DNA, 1074 bp, Saccharomyces cerevisiae
atgtctgtttctaccgcctctacagagatgtcggttaggaagatcgctgctcatatgaaaagcaaccccaacgctaaagtaatctttatggtgggtgccgggatatccacttcttgtgggataccagacttccgatctccgggaactggcctgtaccataacttggccaggttgaagttgccgtaccctgaagcagtgttcgatgtcgattttttccaatcggatcctttgccattttacactttggctaaagagttgtatcccggaaatttcagaccttctaagtttcactatcttttgaaattgtttcaagacaaagacgttttgaagagagtatatacccagaatatagacactttagaaagacaggccggtgttaaggatgatctgatcatcgaggcccatggcagttttgctcactgtcattgtatcggatgtggtaaagtttatcccccacaggttttcaaatccaagctggcagagcatcctataaaggattttgtcaagtgtgatgtgtgcggtgaactggtaaagccggcaatagttttttttggcgaagatctaccggattccttttcggaaacttggttaaacgattcagagtggcttcgtgaaaaaatcacgacatctggaaaacatcctcagcagcctcttgtcatcgtcgttggcacctcactagccgtttatccctttgcgtctctgcccgaagaaattcctcgaaaggtaaaaagagttctgtgcaatttggaaacggtgggcgattttaaagctaacaagaggcctacagatttaatagttcatcagtactcggatgagtttgccgagcaactcgttgaagaattaggttggcaagaagatttcgaaaagatacttacggcccaaggtggaatgggggataactctaaagagcaattacttgaaattgtacatgatttagagaatttgagtttggatcaatctgaacatgagagtgcagacaagaaggataagaagctacagcgtctcaatggccatgacagcgatgaagatggagcaagcaactcctcttcttcacaaaaagccgctaaagaataa

SEQ ID NO: 11402 - DNA, 1074 bp, Artificial Sequence
  Description of Artificial Sequence: Synthetic polynucleotide
atgtctgtttctaccgcctctacagagatgtctgttaggaagatcgctgctcatatgaaaagcaaccccaacgctaaagtaatctttatggtgggtgccgggatatccacttcttgtgggataccagacttcagatctccgggaactggcctttaccataacttggccaggttgaagttgccgtaccctgaagcagtgttcgatgtcgattttttccaatctgatcctttgccattttacactttggctaaagagttgtatcccggaaatttcagaccttctaagtttcactatcttttgaaattgtttcaagacaaagacgttttgaagagagtatatacccagaatatagacactttagaaagacaggccggtgttaaggatgatttgatcatcgaggcccatggcagttttgctcactgtcattgtatcggatgtggtaaagtttatcccccacaggttttcaaatccaagttagcagagcatcctataaaggattttgtcaagtgtgatgtgtgcggtgaattggtaaagccggcaatagttttttttggcgaagatttaccggattccttttctgaaacttggttaaacgattctgagtggcttcgtgaaaaaatcacgacatctggaaaacatcctcagcagcctcttgtcatcgtcgttggcacctctttggccgtttatccctttgcgtctttacccgaagaaattcctagaaaggtaaaaagagttttgtgcaatttggaaacggtgggcgattttaaagctaacaagaggcctacagatttaatagttcatcagtactctgatgagtttgccgagcaactcgttgaagaattaggttggcaagaagatttcgaaaagatacttacggcccaaggtggaatgggggataactctaaagagcaattacttgaaattgtacatgatttagagaatttgagtttggatcaatctgaacatgagagtgcagacaagaaggataagaagttacagcgtctcaatggccatgacagcgatgaagatggagcaagcaactcctcttcttctcaaaaagccgctaaagaatga

SEQ ID NO: 11403 - DNA, 1146 bp, Saccharomyces cerevisiae
atgctgctggaaagattgcacaagagattacacgccggctcttctaggcgatctcaagaaaataaggacaagaattgcaagcccgaagacgcgttgcccatccaaccagaagctcaacatcaaactcaggaccctcagccgttgttaaattgtgattacgatgacatgattgcatttgacagaaacttgtccactcccgttttcactccggtaatgactcctataaataatagcagctccaatcaggcgaaaagctcggatgcctcgtattttccaccttacctcaatgctaatagaaccagacagaatagcgcctcttcgctggcgagttccgtttccgatttcgctcagaatttcaaacaacataccttttacaacaataacgctcaattcacttcgttcacaccgcagtttgtcggccttctattagaagtttaccaaaacacgtgcagcgatcctacgataactccgtttgatactacaaaccctccctcaggaatattgaatagagttgccaaagcggctatacagcaatctgagcttcaacaattggatatcggatgtgacagaaatagctggcttttaacattggtaagacagcgcttgttgcaagaggtcagaaaagacggctatctttctcgtaacacttctttaacttctttacccccaccacccccaccacagttttctgaaatgcttagagttccctccccgtttgttaacgcagatattaccgatccaatccccttatcaaacacaaactcgaatccgaatgtaagctctactaccagcctgaccaacacgttgaactggtattccttacaaagatccaacgtctcaatgaagaatagaaatggctcgtcccagtatatttcagaattacaaccacaacctatcttagcccgcacaaattctaacaatagtgttagcaacagtaatgccttttctttactcacgccaacgcctacaacagattccgcatttaattttaacatagctctgctatcgagacaacgtagcaatatcatatcgtcccccttagctagtactcgtttacctacagcaaacgtgtccactgaagaatcctctattttaccaaatgaatcattgaagctaaaaagagatttattgcgtcttaaaaggtaa

SEQ ID NO: 11404 - DNA, 1146 bp, Artificial Sequence
  Description of Artificial Sequence: Synthetic polynucleotide
atgttattggaaagattgcacaagagattacacgccggctcttctaggcgttctcaagaaaataaggacaagaattgcaagcccgaagacgcgttgcccatccaaccagaagctcaacatcaaactcaggaccctcagccgttgttaaattgtgattacgatgacatgattgcatttgacagaaacttgtccactcccgttttcactccggtaatgactcctataaataatagcagctccaatcaggcgaaaagcagtgatgcctcttattttccaccttacctcaatgctaatagaaccagacagaatagcgcctcttctttagcgagttccgtttccgatttcgctcagaatttcaaacaacataccttttacaacaataacgctcaattcacttctttcacaccgcagtttgtcggccttttattagaagtttaccaaaacacgtgcagcgatcctacgataactccgtttgatactacaaaccctcccagtggaatattgaatagagttgccaaagcggctatacagcaatctgagcttcaacaattggatatcggatgtgacagaaatagctggcttttaacattggtaagacagcgcttgttgcaagaggtcagaaaagacggctatctttctcgtaacacttctttaacttctttacccccaccacccccaccacagttttctgaaatgcttagagttccctccccgtttgttaacgcagatattaccgatccaatccccttatctaacacaaacagtaatccgaatgtaagctctactaccagcttgaccaacacgttgaactggtattccttacaaagatccaacgtctccatgaagaatagaaatggcagctcccagtatatttctgaattacaaccacaacctatcttagcccgcacaaattctaacaatagtgttagcaacagtaatgccttttctttactcacgccaacgcctacaacagattccgcatttaattttaacatagctttgctttctagacaacgtagcaatatcatatcttcccccttagctagtactcgtttacctacagcaaacgtgtccactgaagaatcctctattttaccaaatgaatctttgaagttgaaaagagatttattgcgtcttaaaaggtga

SEQ ID NO: 11405 - DNA, 366 bp, Saccharomyces cerevisiae
atgacctgtggtctagtacgaataaggttagctagatttggaagaaaaaatagtccggtctataatatcgtagtggctaattcccgtaaggcgagggatgctaaaccgatcgaggtactaggaacctacgtgccggtacccagcccagtgaccaagagagaattgaagaggggcgttgtacctattaaagacgtgaagcttgattttgatagaacaaaatattggattggtgtgggagcacaacctagcgaaacagttactaaactattacgaaaggctggtatattaaatgatgcatgggccactagtaagaacagcaatgtgaataggaaagttgtatttgaaagaatggaaacattggagtga

SEQ ID NO: 11406 - DNA, 366 bp, Artificial Sequence
  Description of Artificial Sequence: Synthetic polynucleotide
atgacctgtggtttagtaagaataaggttagctagatttggaagaaaaaatagtccggtctataatatcgtagtggctaattcccgtaaggcgagggatgctaaaccgatcgaggtattgggaacctacgtgccggtacccagcccagtgaccaagagagaattgaagaggggcgttgtacctattaaagacgtgaagcttgattttgatagaacaaaatattggattggtgtgggagcacaacctagcgaaacagttactaaattattaagaaaggctggtatattaaatgatgcatgggccactagtaagaacagcaatgtgaataggaaagttgtatttgaaagaatggaaacattggagtga

SEQ ID NO: 11407 - DNA, 3687 bp, Saccharomyces cerevisiae
atggatcaagacaaagttgcttttcttttagagctggaggacaagctggctaaaattcgttcccaagtaaactctaaattggagaatcaaaagcatattgctataatattaactgccgttgaggaaaatattgcaggtcaagctacaaatgatgtttcaaaaaacattgtaaattatatcatttcctttatgtcactattggatcaagcagtagacccatctactcatgaaataaaagatattcaattggcttcctcatctacatatcttctagatctgatatttcattattcgcctaaggtattattaagatcgaagttttctgaaatcctaacgaaaattgccccatgtatcactgcagaaaaggctaatgcccctctaattagagctgctattggttgtttagaatctcttcttattgctcaagatgcacaagcctggaacaatacttatgatctaaacgtcactccaaaaagaggtttgcagggtatacttgaactttctttagatgtaagaccaaaagttagaaagagagcgctagatgcagttcatgcggtcttattaaaccctcctgttgcaccaactgcagagcatgtagcggcagtttttgtagcagatttctgtgacaagcagttagcaggtattttaaatgatctctcgaatttatcaaataaacaattgaaagcacagaaaacaaaggaagacattaacgctagtgtcatgcgctctctaaggttgattacttcagtcgtctctactggacagtggccatcttcacagattgagcctctttgtgatgtactattgggagtcaccaaaagctcagagcaatatctcgtttctgcatcatttgaatgttttgaaagcatgttcaaaacaatggcagaaactaccatttcttctggattggctgaaaataagtacctaagagtcttggataccatttttgcattaaaaccctcaaatgtcgatacattattaaccaagtcctggattgctgtggtcattaagggtatgtccacttacgcaacacatcaaccactgaaagcgctacgtaaaattcctggtgtatttcacattatgtgcacatatttagctagtgaaactccagaagtgtaccaagctgcctctcaatgtcttatctcaatcctttctgagtctgttaaagatgatttgttattgtatacaccaagtgtggatgagaaagttttcaaaaacgtagatgaaatcatctctcaaattgcgaaaacatttatcgactttttatccattagatattcccattgttccagagaaattcttaagattttggtggcagcattcaacaaattcagatatagatctaatcctcactttttaaaatcactgaaaatagtcgatacatggagagtaaatgaagaacagtttatggatttgagaaatgaaatcgaattagtaatcggagcctccatttctgctatgggccctgaaatgatactcgcagaagcacccctgaatttagacaatccatcttccgaaagacctggcagggcttggttgttaccgcttattagagattatacgaaaaatgcgaaccttgcaacttttcaaaacgaattggcaccatacattaaaagttttcaatctaagttcgataaagtcccggaagaatctattcaattgagagtttttcaaactattgttgaccaaatctggtctacacttccacggttttgtgaactcccaatggacttgagggaatccttcactgacgaatttgcctcagaactatcttctttattatacagcgaggttgagttaagaactacaatttgtcatgctttaaaggtcttggcagaaagcaatgtttcatatgccgaagagtcctcttctcacaacgttttattgttgcaacgtttccccatttctgaagctcaaaagaatatagaatacctttcaaccaaatcaacgaatcttctagcagttttgttcaatgtttatactcaaaccactccaaatgcaaggagttatattttggaaacgattgatcaatatttaaagattacttcaaaggaagatttggagaaaactttcaacaacgtatgtggtcttttgaagaattctatgaatgaagaaagtagcggaaatgtgaacaaagaaaagaaaaagcctcaattgacagcgacactattggacttaatcatatgtatgataacatacttacctgtctcgtcttattctgctttattctcaatgtttagcctcaccgtaaattctgctgacgcgctaattcaaaaaagagcttatagaattattacaaagctttctgagttgaaatcgggatcaacagctgtcgcccaattcatttcggatattgagaatgtcatggtagatagcgcctcctctgttcaaacatctgctaaagctgcaagattaacagcaattaaaaccatagtagaattattacctttagatcatcttgatttcattgttagaaccgtcgctgaggttattttgagtacaaaggatgtgaatgaaaaatctagagagaccgcttttgatactttaatttgtatgggaagaaaaatgaatgagccaaatggtattatcaaattattccaaataccaggttatgatcctaccactccagatcaatcgtcgtcaatatcagagttttttaagatcatttctgccggtcttattggtgaatctcaacatatggttagtagttcaattacgggttatgcttgtttagtttttgaattcaaaaatgaactcgattccggtatactaatggatatatatgacaccattgaattgtacttaacttctaactctagggaaattgtaaaaagcgccattgggtttaccaaggtttgtgttttggggcttccagaagaactgatgaggccaaaggtgccagagttacttctaaagttattaagatggtctcacgaacacactggtcatttcaaagccaaagtcaagcatattattgaaagattaataaggagatttggatatgactacattgaagccaacttccctgaagaagataggagattattaacaaatataagaaagatgcgcaataggaataagcgtaaagatgaagaagttactactggagttagtgatgtagctgccacaaagggttcaagatttatgtctgcattcgatgaagctgtttatgggtctgatgaagaaaatgataatggatcagatcaggaggaaaatgttgctggtggcaaaatgaagaatggggcaaagcaatttattgtagaatccggtgacaacccactagatttgttagattctcaaacactagctcatatatcatctaccagaccaaagaaattcaataagaatcaaaatagagcaaggtttaatgatgatgcgtttaactttgactcagaaggaaaactcgttgtcaaggggcaacctaaaccctctactaatgtagacgatccattgagtgctgtgacaagcggaatcaatgcgtatctagaggctgtgaaaagtggtcctgtaagaggtcaaagaaacaagctgaaattcaggaaaaatggaaaggactctgatgaatttggcgatgatgatgatggtgaaaaggatagtaggctaatgagaggaagagtaaatcaaggtaacaagattggcaaacataataagaaaggtccaaagttcaaatctagaaaaaaattatag

SEQ ID NO: 11408 - DNA, 3687 bp, Artificial Sequence
  Description of Artificial Sequence: Synthetic polynucleotide
atggatcaagacaaagttgcttttcttttagagttagaggacaagttggctaaaattcgttcccaagtaaactctaaattggagaatcaaaagcatattgctataatattaactgccgttgaggaaaatattgcaggtcaagctacaaatgatgtttccaaaaacattgtaaattatatcatttcctttatgtctttgttggatcaagcagtagacccatctactcatgaaataaaagatattcaattggcttcctcttctacatatcttttagatttgatatttcattattctcctaaggtattattaagatccaagttttctgaaatcttaacgaaaattgccccatgtatcactgcagaaaaggctaatgcccctttgattagagctgctattggttgtttagaatctcttcttattgctcaagatgcacaagcctggaacaatacttatgatttgaacgtcactccaaaaagaggtttgcagggtatacttgaactttctttagatgtaagaccaaaagttagaaagagagcgttggatgcagttcatgcggtcttattaaaccctcctgttgcaccaactgcagagcatgtagcggcagtttttgtagcagatttctgtgacaagcagttagcaggtattttaaatgatctctctaatttatccaataaacaattgaaagcacagaaaacaaaggaagacattaacgctagtgtcatgcgctctttgaggttgattactagtgtcgtctctactggacagtggccatcttctcagattgagcctctttgtgatgtacttttgggagtcaccaaaagctctgagcaatatctcgtttctgcaagttttgaatgttttgaaagcatgttcaaaacaatggcagaaactaccatttcttctggattggctgaaaataagtacttgagagtcttggataccatttttgcattaaaaccctccaatgtcgatacattattaaccaagtcctggattgctgtggtcattaagggtatgtccacttacgcaacacatcaaccattgaaagcgttgcgtaaaattcctggtgtatttcacattatgtgcacatatttagctagtgaaactccagaagtgtaccaagctgcctctcaatgtcttatctccatcctttctgagtctgttaaagatgatttgttattgtatacaccaagtgtggatgagaaagttttcaaaaacgtagatgaaatcatctctcaaattgcgaaaacatttatcgactttttatccattagatattcccattgttccagagaaattcttaagattttggtggcagcattcaacaaattcagatatagatctaatcctcactttttaaaatctttgaaaatagtcgatacatggagagtaaatgaagaacagtttatggatttgagaaatgaaatcgaattagtaatcggagcctccatttctgctatgggccctgaaatgatactcgcagaagcacccttgaatttagacaatccatcttccgaaagacctggcagggcttggttgttaccgcttattagagattatacgaaaaatgcgaaccttgcaacttttcaaaacgaattggcaccatacattaaaagttttcaatctaagttcgataaagtcccggaagaatctattcaattgagagtttttcaaactattgttgaccaaatctggtctacacttccaagattttgtgaactcccaatggacttgagggaatccttcactgacgaatttgccagtgaattatcttctttattatacagcgaggttgagttaagaactacaatttgtcatgctttaaaggtcttggcagaaagcaatgtttcttatgccgaagagtcctcttctcacaacgttttattgttgcaacgtttccccatttctgaagctcaaaagaatatagaatacctttctaccaaatctacgaatcttttagcagttttgttcaatgtttatactcaaaccactccaaatgcaaggagttatattttggaaacgattgatcaatatttaaagattacttctaaggaagatttggagaaaactttcaacaacgtatgtggtcttttgaagaattctatgaatgaagaaagtagcggaaatgtgaacaaagaaaagaaaaagcctcaattgacagcgacattattggacttaatcatatgtatgataacatacttacctgtcagctcttattctgctttattctccatgtttagcctcaccgtaaattctgctgacgcgttaattcaaaaaagagcttatagaattattacaaagctttctgagttgaaaagtggaagtacagctgtcgcccaattcatttctgatattgagaatgtcatggtagatagcgcctcctctgttcaaacatctgctaaagctgcaagattaacagcaattaaaaccatagtagaattattacctttagatcatcttgatttcattgttagaaccgtcgctgaggttattttgagtacaaaggatgtgaatgaaaaatctagagagaccgcttttgatactttaatttgtatgggaagaaaaatgaatgagccaaatggtattatcaaattattccaaataccaggttatgatcctaccactccagatcaatcttcttctatatctgagttttttaagatcatttctgccggtcttattggtgaatctcaacatatggttagtagttctattacgggttatgcttgtttagtttttgaattcaaaaatgaactcgattccggtatattaatggatatatatgacaccattgaattgtacttaacttctaactctagggaaattgtaaaaagcgccattgggtttaccaaggtttgtgttttggggcttccagaagaattgatgaggccaaaggtgccagagttacttttgaagttattaagatggtctcacgaacacactggtcatttcaaagccaaagtcaagcatattattgaaagattaataaggagatttggatatgactacattgaagccaacttccctgaagaagataggagattattaacaaatataagaaagatgcgcaataggaataagcgtaaagatgaagaagttactactggagttagtgatgtagctgccacaaagggttccagatttatgtctgcattcgatgaagctgtttatgggtctgatgaagaaaatgataatggaagtgatcaggaggaaaatgttgctggtggcaaaatgaagaatggggcaaagcaatttattgtagaatccggtgacaacccattagatttgttagattctcaaacattggctcatatatcttctaccagaccaaagaaattcaataagaatcaaaatagagcaaggtttaatgatgatgcgtttaactttgactctgaaggaaaactcgttgtcaaggggcaacctaaaccctctactaatgtagacgatccattgagtgctgtgacaagcggaatcaatgcgtatttggaggctgtgaaaagtggtcctgtaagaggtcaaagaaacaagttgaaattcaggaaaaatggaaaggactctgatgaatttggcgatgatgatgatggtgaaaaggatagtaggttgatgagaggaagagtaaatcaaggtaacaagattggcaaacataataagaaaggtccaaagttcaaatctagaaaaaaattatga

SEQ ID NO: 11409 - DNA, 1062 bp, Saccharomyces cerevisiae
atgactacaaataatgacttctattttgctctactacgcatatctattctccaattattgaaggcacaaggatttgacagggcaaggcccagtctggtggatgtcatgaccgatctctatgcaaaattcttgagtttgttagcatcagaggtcagttctatcgctcaggcaagatgtgatcaggacgatacaattgctttacaagatataactctggctctggaaaatctaggtattgttaagcctacgaacgttctggatgtctatgatgaaaactccgaattatcaagttcacgaggaatggaaaagttcaaggactggtgtatttatagtactcaattgaccgacgcgcgaataactgccttacccacagtagaattactacaaagtgaggaaaaagaatctgatcctttgtcagcaatacctgactatctcaatcaattactgcaaaacaagggtgcgaaacagaaattagaaacaaagaatagaaaaacagagttgatagaagatctaataaataataatggattagatgattggatcaaattagtcattgctagacaacgtataaacatgattgaaagagcttccaaaaaagaatctcaaaatgtaccggctttaccacatattgcaggctataaatcttccattctaagccgccatcaccacactaccataacaaacgaagataggatgccttcggcgatgaccccaagagatgaggatgccttaacagagatccaagaaaatccatttgtaactagcaaactgccgataatgagaaaagaaaataggttagaaaatataactctttcatttgaggatgaggagcttgaatcacttggcgaagtggaaggccctaaccaaaagtctcaagaaaataacaatgaggaaagttttaaagagaacaataaaagtttaacagagtctcctcatggtgatgaccgtgacatatcaatgtttcaattcgactcaaatgttgatactaaatgggcagagcaggaagatatggacagcacatttcaacgtcgaacctcactagattatgggggttacttttaa

SEQ ID NO: 11410 - DNA, 1062 bp, Artificial Sequence
  Description of Artificial Sequence: Synthetic polynucleotide
atgactacaaataatgacttctattttgctttgttacgcatatctattctccaattattgaaggcacaaggatttgacagggcaaggcccagtttagtggatgtcatgaccgatctctatgcaaaattcttgagtttgttagcaagtgaggtcagttctatcgctcaggcaagatgtgatcaggacgatacaattgctttacaagatataactttggctttggaaaatttgggtattgttaagcctacgaacgttttggatgtctatgatgaaaactccgaattatccagttctagaggaatggaaaagttcaaggactggtgtatttatagtactcaattgaccgacgcgagaataactgccttacccacagtagaattattacaaagtgaggaaaaagaatctgatcctttgagtgcaatacctgactatctcaatcaattattacaaaacaagggtgcgaaacagaaattagaaacaaagaatagaaaaacagagttgatagaagatttgataaataataatggattagatgattggatcaaattagtcattgctagacaacgtataaacatgattgaaagagcttccaaaaaagaatctcaaaatgtaccggctttaccacatattgcaggctataaatcttccattttgagccgccatcaccacactaccataacaaacgaagataggatgccttctgcgatgaccccaagagatgaggatgccttaacagagatccaagaaaatccatttgtaactagcaaattaccgataatgagaaaagaaaataggttagaaaatataactctttcttttgaggatgaggagcttgaatctcttggcgaagtggaaggccctaaccaaaagtctcaagaaaataacaatgaggaaagttttaaagagaacaataaaagtttaacagagtctcctcatggtgatgaccgtgacatatccatgtttcaattcgactctaatgttgatactaaatgggcagagcaggaagatatggacagcacatttcaacgtagaacctctttagattatgggggttacttttga

SEQ ID NO: 11411 - DNA, 570 bp, Saccharomyces cerevisiae
atgtcttctttatcgctatatactgttcaggctgttttaatactagatcagcaaggagaacgaatttatgcaaagtattatcaacctcctcatagatctgatgaaggacaccaattgctcttcaattcggtgaagaagcaaaaagagtttgagaaacaactataccgtaagactcacaagcaagattcggagattttaatcttcgaggatcatttagtcctttacaaagaatacattgatatcacgatatatttagttgcttcgctggaagagaatgaaattgttcttcagcaaggattttcagcaatcagaggagctttggatttgattttgaactcaggaatggacaaaaaaaacatccaagaaaactatgatatggttttattagctattgatgaaaccattgataatggtgttatcctcgaaactgactctaacactattgcatccagagtttctaaaccacctacgaacgaaccccaaatggcattagatttggataagggtttcttaggcgcgtggggtttcgcaaagagcaagtttcaagaaaggttacagcaaggcttatga

SEQ ID NO: 11412 - DNA, 570 bp, Artificial Sequence
  Description of Artificial Sequence: Synthetic polynucleotide
atgtcttctttaagtctttatactgttcaggctgttttaatattggatcagcaaggagaaagaatttatgcaaagtattatcaacctcctcatagatctgatgaaggacaccaattgctcttcaattctgtgaagaagcaaaaagagtttgagaaacaattgtaccgtaagactcacaagcaagattctgagattttaatcttcgaggatcatttagtcctttacaaagaatacattgatatcacgatatatttagttgcttctttggaagagaatgaaattgttcttcagcaaggattttctgcaatcagaggagctttggatttgattttgaactctggaatggacaaaaaaaacatccaagaaaactatgatatggttttattagctattgatgaaaccattgataatggtgttatcctcgaaactgactctaacactattgcatccagagtttctaaaccacctacgaacgaaccccaaatggcattagatttggataagggtttcttaggcgcgtggggtttcgcaaagagcaagtttcaagaaaggttacagcaaggcttatga

SEQ ID NO: 11413 - DNA, 3117 bp, Saccharomyces cerevisiae
atgaagcaaagaattagtgccctagatttactgctgttggctagagagctgaaacaggatttggaaggctaccgattgagtaatatatataacattgccgattcctcaaaacaatttttgctgaaatttaataaaccagattctaaactcaatgttgttgtcgattgtggcttaagaatttacttaactgaatttagtaggccaatacctccaactccttccggctttgttgtcaaactaaggaagcatcttaaagctaaacggttaacagctttaaagcaagtagaccaggatagaattcttgttctacaatttgctgatggccacttctatttagttttggaatttttcagtgcagggaatgtcattcttctagatgagaacagaagaattatggctttgcaaagagtcgttctagagcatgaaaataaggtcggacaaatttatgaaatgtttgacgaatcactttttaccacaaataacgagtctgctgatgaatccatagaaaaaaacagaaaggcagaatacacctctgaactagtcaacgagtggataaaagcagttcaagccaagtatgaatcagacattactgttattaagcaacttaacattcaagggaaggagggcgctaaaaaaaaaaaagtgaaagtaccttccatccataaactgctgctttcgaaagtccctcatttgtcttcagatttattatcaaagaaccttaaggtattcaatatcgacccttcagagtcttgtttaaatcttttggaggaaacagactcactcgccgaattgctaaacagtactcagttagaatataatcaacttttaactaccaccgatagaaagggttacattttggccaaaagaaatgaaaattatatctctgaaaaagatactgccgatttggaatttatttatgatacattccatccctttaagccatatataaatgggggagacactgactcttcttgtatcattgaagttgaaggtccttacaataggacgctagacaaatttttctcaacaatagaatcctctaagtatgctctacgtatacaaaatcaggaatcgcaagcgcaaaagaaaatcgatgatgctcgtgccgaaaatgatagaaaaatacaagctttattagacgtccaagaactaaatgaaaggaaaggccatctcataattgaaaatgcacccttaatagaggaagttaagcttgctgttcagggtctaatcgatcaacaaatggactggaacactattgagaaactaattaaaagtgaacaaaaaaaaggcaacagaattgctcagcttttgaacttgcctttgaacttgaaacagaacaaaattagcgtcaagcttgatctctctagcaaggaactcaacacttcttcagacgaggacaatgaatcagaaggcaatactactgatagttctagtgactcagactcagaagacatggagagttcgaaggagaggagtacaaaaagtatgaaaagaaaatctaatgaaaagataaacgttacaattgaccttggtttatcagcttatgccaatgccactgaatatttcaatatcaaaaaaacaagtgctcaaaagcagaaaaaagtcgaaaagaatgtcggcaaggctatgaagaatattgaagtcaaaattgatcaacaattgaaaaaaaagctaaaagattctcacagtgtcttaaaaaagatccgcactccttacttttttgaaaaatatagttggtttatttcaagtgaaggatttttggtcatgatgggtaaaagtccggctgagacagatcaaatctattcaaaatatattgaagatgatgatatttatatgtccaatagttttaactctcatgtatggatcaaaaatccagaaaaaacagaagttccaccgaacactttgatgcaagcgggtatactatgcatgtcctcaagcgaggcttggtcgaagaagatatcttcttctccatggtggtgctttgcaaagaatgttagtaaattcgatggctctgataactccattctgccagaaggtgcctttcggttgaaaaatgagaatgatcaaaaccatttaccccctgctcaacttgtgatgggttttggatttttatggaaagtgaaaaccagtggaaatgaggataatggtgatgatgacgaagaagaagaagaagaagaagaggaagaagaagaagaagaagaagaagaagaagaagaagaagaagaagaaaaagaagaagaagaaaaagaagaagagcaacagcaagatgaagacgatagtaacgaggtcaatgggttagagaagggtggagattcaaacgatagcacgaaaaacaacagttttgaacacgataatcttgaaaaagacatcgaaaagcattgcaccatatcatccgataccgactctgattctggaaatgctaaagccaaaaatgacaatagcagtacgcagcgtatccttgatgaaccaggtgttccgatatctttaatcgaaaacataaacagtaacgtccgtggtaaaagaggaaaattgaagaaaattcaaaagaaatacgccgaccaggatgaaactgaacgtctcttgcgtttggaggccttgggtactttgaagggtatcgaaaagcagcaacaaaggaagaaagaagaaataatgaagcgagaagttagagaagatagaaagaataaacgcgagaaacaaagaagactacaggctttaaaattcaccaaaaaagagaaagcaagagtgaactatgataaacacaagtccgaattaaaaccatctctcgataagggcgatgtggttgatgatattataccagtatttgccccctggcctgcgcttttgaaatataaatacaaagtcaaaatacaaccgggaagtgcgaagaaaactaagactttaactgaaattttacattatttcaagagtagaccactagacggttcttcaactgacaacgaaatggattggccccaagaacatgaaatgattaaaggcttgaaggaacaggacttggttcttctgctctgtgtcgacaagttaaaagtaacaatcgctgggcagaaatccaccaagaacggtggtaactcttcgaagaagggcaaaaaaaaacgctaa

SEQ ID NO: 11414 - DNA, 3117 bp, Artificial Sequence
  Description of Artificial Sequence: Synthetic polynucleotide
atgaagcaaagaattagtgccttggatttattattattggctagagagttgaaacaggatttggaaggctacagattgagtaatatatataacattgccgattcctctaaacaatttttgttgaaatttaataaaccagattctaaactcaatgttgttgtcgattgtggcttaagaatttacttaactgaatttagtaggccaatacctccaactccttccggctttgttgtcaaattgaggaagcatcttaaagctaaaagattaacagctttaaagcaagtagaccaggatagaattcttgttttgcaatttgctgatggccacttctatttagttttggaatttttcagtgcagggaatgtcattcttttagatgagaacagaagaattatggctttgcaaagagtcgttttggagcatgaaaataaggtcggacaaatttatgaaatgtttgacgaatctctttttaccacaaataacgagtctgctgatgaatccatagaaaaaaacagaaaggcagaatacacctctgaattggtcaacgagtggataaaagcagttcaagccaagtatgaaagtgacattactgttattaagcaacttaacattcaagggaaggagggcgctaaaaaaaaaaaagtgaaagtaccttccatccataaattattactttctaaagtccctcatttgtcttctgatttattatccaagaaccttaaggtattcaatatcgacccttctgagtcttgtttaaatcttttggaggaaacagactctctcgccgaattgttgaacagtactcagttagaatataatcaacttttaactaccaccgatagaaagggttacattttggccaaaagaaatgaaaattatatctctgaaaaagatactgccgatttggaatttatttatgatacattccatccctttaagccatatataaatgggggagacactgactcttcttgtatcattgaagttgaaggtccttacaataggacgcttgacaaatttttcagtacaatagaatcctctaagtatgctttgcgtatacaaaatcaggaatctcaagcgcaaaagaaaatcgatgatgctcgtgccgaaaatgatagaaaaatacaagctttattagacgtccaagaattgaatgaaaggaaaggccatctcataattgaaaatgcacccttaatagaggaagttaagcttgctgttcagggtttgatcgatcaacaaatggactggaacactattgagaaattgattaaaagtgaacaaaaaaaaggcaacagaattgctcagcttttgaacttgcctttgaacttgaaacagaacaaaattagcgtcaagcttgatctctctagcaaggaactcaacacttcttctgacgaggacaatgaaagtgaaggcaatactactgatagttctagtgacagtgactctgaagacatggagagttccaaggagaggagtacaaaaagtatgaaaagaaaatctaatgaaaagataaacgttacaattgaccttggtttatctgcttatgccaatgccactgaatatttcaatatcaaaaaaacaagtgctcaaaagcagaaaaaagtcgaaaagaatgtcggcaaggctatgaagaatattgaagtcaaaattgatcaacaattgaaaaaaaagttgaaagattctcacagtgtcttaaaaaagatccgcactccttacttttttgaaaaatatagttggtttatttccagtgaaggatttttggtcatgatgggtaaaagtccggctgagacagatcaaatctattctaaatatattgaagatgatgatatttatatgtccaatagttttaactctcatgtatggatcaaaaatccagaaaaaacagaagttccaccgaacactttgatgcaagcgggtatattgtgcatgtcctctagcgaggcttggtccaagaagatatcttcttctccatggtggtgctttgcaaagaatgttagtaaattcgatggctctgataactccattttaccagaaggtgcctttagattgaaaaatgagaatgatcaaaaccatttaccccctgctcaacttgtgatgggttttggatttttatggaaagtgaaaaccagtggaaatgaggataatggtgatgatgacgaagaagaagaagaagaagaagaggaagaagaagaagaagaagaagaagaagaagaagaagaagaagaagaaaaagaagaagaagaaaaagaagaagagcaacagcaagatgaagacgatagtaacgaggtcaatgggttagagaagggtggagattccaacgatagcacgaaaaacaacagttttgaacacgataatcttgaaaaagacatcgaaaagcattgcaccatatcttccgataccgactctgattctggaaatgctaaagccaaaaatgacaatagcagtacgcagcgtatccttgatgaaccaggtgttccgatatctttaatcgaaaacataaacagtaacgtccgtggtaaaagaggaaaattgaagaaaattcaaaagaaatacgccgaccaggatgaaactgaacgtctcttgcgtttggaggccttgggtactttgaagggtatcgaaaagcagcaacaaaggaagaaagaagaaataatgaagagagaagttagagaagatagaaagaataaacgcgagaaacaaagaagattacaggctttaaaattcaccaaaaaagagaaagcaagagtgaactatgataaacacaagtccgaattaaaaccatctctcgataagggcgatgtggttgatgatattataccagtatttgccccctggcctgcgcttttgaaatataaatacaaagtcaaaatacaaccgggaagtgcgaagaaaactaagactttaactgaaattttacattatttcaagagtagaccattggacggttcttctactgacaacgaaatggattggccccaagaacatgaaatgattaaaggcttgaaggaacaggacttggttcttttactctgtgtcgacaagttaaaagtaacaatcgctgggcagaaatccaccaagaacggtggtaactcttccaagaagggcaaaaaaaaacgctga

SEQ ID NO: 11415 - DNA, 2586 bp, Saccharomyces cerevisiae
atggacaaaaaggaatattcggagactttctatcatccttataagccctatgatattcaggtacagttaatggaaactgtatacagagtgctatccgaagggaagaaaatagctatcctggaaagccccactgggacaggcaagacgctgtccttaatctgtgccacgatgacttggttgagaatgaataaagcagatattttcacccgcatggaaactaacatcaaaacgaatgaagatgatagtgaaaacctaagcgatgacgagccagactgggttattgacacttatcgaaagtctgttttacaagaaaaggtggatttgctaaatgattatgagaagcatttaaacgaaattaacacgaccagttgtaagcagttgaaaactatgtgtgatttagataaagaacatggaagatataaatcagttgatccattaagaaagaaacgcaaaggcgctaggcaccttgatgtatcacttgaagaacaagattttattccgcgcccgtacgaatcagattctgaaaacaatgatacctccaaaagcacaagaggaggaagaatatctgataaagattacaaattgagtgaactaaattcacaaataataacacttttagacaaaattgatgggaaggtttcgagagatccaaacaatggcgatcgctttgacgttacaaatcaaaatccagtgaaaatatattatgcatccagaacttattcacaattaggtcaatttacttctcagttaagattaccctcgttcccatcatcctttagggataaggtcccagatgaaaaggtgaagtacttaccacttgcttcgaaaaagcagctttgtattaatccaaaagtgatgaagtggaaaacattggaagctattaatgacgcatgtgcggaccttagacatagtaaagagggatgtatcttttatcaaaatacaaacgaatggcgtcattgtcctgatacgttagctctcagagatatgattttttcagaaattcaagatattgaagatttagttcccctgggaaaatctttgggaatttgtccctattacgcctcgagggaggcacttcctattgcggaggtagtgactttgccatatcaatacttactttctgagtccacccgttcaagtcttcaaataaaccttgaaaattctatagtaattattgatgaggctcataatttgatagaaacaataaattctatatattcctctcagatctcgttggaggacttaaagaattgccataaggggatagtaacttatttcaacaaatttaagtccaggctcaatcccggtaacagagtaaatctattaaagctcaattcacttttgatgactctgattcaatttatagttaaaaatttcaagaagataggacaagaaatagatcctaacgatatgttcacaggaagtaacatcgataccctaaacattcataaactattgagatatataaaagtctccaaaattgcttacaaaattgacacgtataaccaggcactaaaagaggaagaatcgtcaaaaaatgaaaatccaataaaagaaacgcataaaaaatcagtttcttctcagccattacttttcaaggtttctcaattcctatattgtttgacaaatttgacgtcagaaggacaatttttttttgagaaaaattattcaataaagtacatgcttctagaaccaagtaaaccttttgagtcaatactaaatcaagcaaaatgtgtagtccttgcaggtgggacaatggaacccatgtcagagtttttgtcgaatttgctacctgaagttccttctgaagacattacgaccttgtcgtgcaatcatgttataccgaaagagaatttgcaaacttatatcacaaaccagcctgagcttgagttcacattcgaaaaaagaatgtctccctcccttgtaaataatcatctttttcaattttttgttgatctgagcaaagcagttcctaaaaagggtggtattgtagctttttttccaagctatcagtatttggcgcatgtaattcagtgctggaaacagaatgacaggtttgctacattaaataacgtgaggaaaatattctatgaagcaaaagacggcgatgatattctatctggatattctgattcggtagcagagggaagggggtctcttttgctggctattgttgggggaaaattatcagagggaataaattttcaagatgatttatgtagggctgtggtgatggtgggcctgccgttcccaaatatttttagtggagaactaatagttaaaaggaagcatttggccgctaaaataatgaagtcaggcggaacggaagaggaagcttcacgagcaacaaaggagtttatggagaatatttgtatgaaagctgtcaaccaaagtgttggacgtgctatacggcatgcaaatgattacgcaaacatttacttgctcgatgtgcgatataataggcccaatttccggaaaaaattgtcacgttgggtgcaagattctatcaattccgaacatacaacacatcaggtcatttcttcaacacggaagtttttttcaatgcgcagcctgaattcacgctaa

SEQ ID NO: 11416 - DNA, 2586 bp, Artificial Sequence
  Description of Artificial Sequence: Synthetic polynucleotide
atggacaaaaaggaatattctgagactttctatcatccttataagccctatgatattcaggtacagttaatggaaactgtatacagagtgttatccgaagggaagaaaatagctatcttggaaagccccactgggacaggcaagacgttatccttaatctgtgccacgatgacttggttgagaatgaataaagcagatattttcacccgcatggaaactaacatcaaaacgaatgaagatgatagtgaaaacttgagcgatgacgagccagactgggttattgacacttatagaaagtctgttttacaagaaaaggtggatttgttgaatgattatgagaagcatttaaacgaaattaacacgaccagttgtaagcagttgaaaactatgtgtgatttagataaagaacatggaagatataaatctgttgatccattaagaaagaaacgcaaaggcgctaggcaccttgatgtatctcttgaagaacaagattttattccgcgcccgtacgaaagtgattctgaaaacaatgatacctccaaaagcacaagaggaggaagaatatctgataaagattacaaattgagtgaattgaattctcaaataataacacttttagacaaaattgatgggaaggtttctagagatccaaacaatggcgatcgctttgacgttacaaatcaaaatccagtgaaaatatattatgcatccagaacttattctcaattaggtcaatttacttctcagttaagattaccctctttcccatcttcctttagggataaggtcccagatgaaaaggtgaagtacttaccacttgcttccaaaaagcagctttgtattaatccaaaagtgatgaagtggaaaacattggaagctattaatgacgcatgtgcggaccttagacatagtaaagagggatgtatcttttatcaaaatacaaacgaatggcgtcattgtcctgatacgttagctctcagagatatgattttttctgaaattcaagatattgaagatttagttcccttaggaaaatctttgggaatttgtccctattacgcctctagggaggcacttcctattgcggaggtagtgactttgccatatcaatacttactttctgagtccacccgttctagtcttcaaataaaccttgaaaattctatagtaattattgatgaggctcataatttgatagaaacaataaattctatatattcctctcagatctctttggaggacttaaagaattgccataaggggatagtaacttatttcaacaaatttaagtccaggctcaatcccggtaacagagtaaatttattaaagctcaattctcttttgatgactttgattcaatttatagttaaaaatttcaagaagataggacaagaaatagatcctaacgatatgttcacaggaagtaacatcgataccttgaacattcataaacttttgagatatataaaagtctccaaaattgcttacaaaattgacacgtataaccaggcattgaaagaggaagaatcttctaaaaatgaaaatccaataaaagaaacgcataaaaaatctgtttcttctcagccattacttttcaaggtttctcaattcctctattgtttgacaaatttgacgagtgaaggacaatttttttttgagaaaaattattctataaagtacatgcttttagaaccaagtaaaccttttgagagtatattgaatcaagcaaaatgtgtagtccttgcaggtgggacaatggaacccatgtctgagtttttgagcaatttgttacctgaagttccttctgaagacattacgaccttgtcttgcaatcatgttataccgaaagagaatttgcaaacttatatcacaaaccagcctgagcttgagttcacattcgaaaaaagaatgtctccctcccttgtaaataatcatctttttcaattttttgttgatttgagcaaagcagttcctaaaaagggtggtattgtagctttttttccaagctatcagtatttggcgcatgtaattcagtgctggaaacagaatgacaggtttgctacattaaataacgtgaggaaaatattctatgaagcaaaagacggcgatgatattttatctggatattctgattctgtagcagagggaagggggtctcttttgttggctattgttgggggaaaattatctgagggaataaattttcaagatgatttatgtagggctgtggtgatggtgggcttaccgttcccaaatatttttagtggagaattgatagttaaaaggaagcatttggccgctaaaataatgaagtctggcggaacggaagaggaagcttctagagcaacaaaggagtttatggagaatatttgtatgaaagctgtcaaccaaagtgttggacgtgctataagacatgcaaatgattacgcaaacatttacttgctcgatgtgaggtataataggcccaatttcagaaaaaaattgtctcgttgggtgcaagattctatcaattccgaacatacaacacatcaggtcatttcttctacaagaaagtttttttccatgcgcagcttgaatagccgctga

SEQ ID NO: 11417 - DNA, 1767 bp, Saccharomyces cerevisiae
atgaagcttctaaaggacttattggtagatagaaaggaatttgaggattggaagaacaatttaacatgggctcgggatggtactctatatttgaccacatttcctgatattagcattgggcagccaaaatatgctaaagacattaattgcaacagtaagaatttatttcatgtgaaagaattcccgctagaatttgaaaataaactggatttcgagctggcgcaacagaatgggttattaaattcacaacctgtttgttatcccagagtctgtaagccatcaccaatagacgattggatggccgtattgagcaataatggtaatgtttctgtgttcaaagataacaaaatgctcacaaatctcgattcaaaaggaaacttaagtagcagaacctaccattgttttgaatggaatcctattgaatcatcaatcgtggttggtaatgaagacggtgagcttcaattctttagcattcgcaaaaattcagaaaatactccagaattttattttgagagtagtattagattaagtgacgcaggctcaaaagactgggtcactcatatagtatggtacgaagacgttcttgtagcggcgctttcaaacaattctgtattttcaatgacagtttctgcttcctctcatcaacccgtttctagaatgatacaaaatgcttcgagaagaaaaattactgatttaaagatagtggattataaggtggttttaacttgtcccggatatgtgcataagatagatttaaaaaattattcaatttctagcttgaaaacaggatctctcgaaaattttcatataatcccattgaatcatgagaaagagagcacgatattattgatgtccaataagactagttataaagttttactagaagacgaacttcatgtgacggctgataatattatcgcgccttacttagagaagaaattcaagaaatggagcacaatttggaatgaattcaataattatgaaacaactcttgtcatacacggaatatctctctctccagacggctattcaatagccatagtatacgatatggaacgggtggctttcaaatataaaatagcttcagaacaatcgtttaacatcatgttcgccccactatatcatacttggacaatttctgaacgtgctgttggattagcgtggtatcagacgtaccaaatttacaaccaatcgctgcccaaacttccagaaaatttcagtatgaacaagaaattactgaatggtaattaccctattagtctggatttccaatcatacctcaatgcattaatgaaaagtgaagagatgaggattataatgttcttgaatatgactatcgataaaccgtcaattttgtcatttttggaagccttatatgaatacgctataaacaaaaaatccgaattaacgaatagttttgatttagcttgcgtattatctatagcggcaatacttaaaagagaagcgccaatttacaacggcacgttattgatgaagaacagctttctcgaggaaacgttcaatttagaaagcttcacggctgaccctgaaactgtaacatccaccacgaataacacgtggaagaggtgtggtgtcactttgcttccaatacttacaacgcatgtaaagatatgtcccgtgagcaaacaacgggtaatagacataaaacgagatgatttgaatgattatggttggtttacaaggggtctattagaaagatttaatgaaataagcgtatattgtggaacaacgctggaagttatgtaa

SEQ ID NO: 11418 - DNA, 1767 bp, Artificial Sequence
  Description of Artificial Sequence: Synthetic polynucleotide
atgaagcttttgaaggacttattggtagatagaaaggaatttgaggattggaagaacaatttaacatgggctagagatggtactttatatttgaccacatttcctgatattagcattgggcagccaaaatatgctaaagacattaattgcaacagtaagaatttatttcatgtgaaagaattcccgttggaatttgaaaataaattggatttcgagttagcgcaacagaatgggttattaaattctcaacctgtttgttatcccagagtctgtaagccatctccaatagacgattggatggccgtattgagcaataatggtaatgtttctgtgttcaaagataacaaaatgctcacaaatctcgattctaaaggaaacttaagtagcagaacctaccattgttttgaatggaatcctattgaatcttctatcgtggttggtaatgaagacggtgagcttcaattctttagcattcgcaaaaattctgaaaatactccagaattttattttgagagtagtattagattaagtgacgcaggctctaaagactgggtcactcatatagtatggtacgaagacgttcttgtagcggcgctttccaacaattctgtattttccatgacagtttctgcttcctctcatcaacccgtttctagaatgatacaaaatgcttccagaagaaaaattactgatttaaagatagtggattataaggtggttttaacttgtcccggatatgtgcataagatagatttaaaaaattattctatttctagcttgaaaacaggatctctcgaaaattttcatataatcccattgaatcatgagaaagagagcacgatattattgatgtccaataagactagttataaagttttattggaagacgaacttcatgtgacggctgataatattatcgcgccttacttagagaagaaattcaagaaatggagcacaatttggaatgaattcaataattatgaaacaactcttgtcatacacggaatatctctctctccagacggctattctatagccatagtatacgatatggaaagagtggctttcaaatataaaatagcttctgaacaaagttttaacatcatgttcgccccattgtatcatacttggacaatttctgaacgtgctgttggattagcgtggtatcagacgtaccaaatttacaaccaaagtttacccaaacttccagaaaatttcagtatgaacaagaaattattgaatggtaattaccctattagtttggatttccaatcttacctcaatgcattaatgaaaagtgaagagatgaggattataatgttcttgaatatgactatcgataaaccgtctattttgagttttttggaagccttatatgaatacgctataaacaaaaaatccgaattaacgaatagttttgatttagcttgcgtattatctatagcggcaatacttaaaagagaagcgccaatttacaacggcacgttattgatgaagaacagctttctcgaggaaacgttcaatttagaaagcttcacggctgaccctgaaactgtaacatccaccacgaataacacgtggaagaggtgtggtgtcactttgcttccaatacttacaacgcatgtaaagatatgtcccgtgagcaaacaaagagtaatagacataaaaagagatgatttgaatgattatggttggtttacaaggggtttattagaaagatttaatgaaataagcgtatattgtggaacaacgttagaagttatgtga

SEQ ID NO: 11419 - DNA, 3513 bp, Saccharomyces cerevisiae
atgaatgtgctatggattatagcactagttggccagctgatgcggctcgttcagggaacagctacctgtgccatgtatgggaactgtgggaaaaagtcagtatttggaaacgaattaccttgccctgtgccacgtagttttgaacctcctgttctttcagatgaaacaagcaaacttttggttgaagtttgtggtgaagagtggaaagaggtccgttatgcctgctgtactaaagatcaagtggtagcactgagagataacctacaaaaggctcaacctttaatttcctcatgcccagcatgcctcaagaattttaataacctgttctgtcacttcacttgcgctgctgaccaaggaaggtttgtcaatattaccaaggtagaaaagtcaaaagaagataaagatattgttgcggaattagacgttttcatgaattcgtcttgggcatctgaattttatgactcatgtaagaatattaaattttctgctaccaacggttatgcgatggacctaatcggaggtggtgctaaaaattacagtcaattcttgaagtttttgggggatgctaaacctatgcttggtggatccccctttcagattaattacaagtatgatttagcaaatgaagaaaaagaatggcaggaatttaatgatgaggtttatgcttgcgatgatgctcaatataaatgtgcgtgttctgattgtcaagagtcttgcccccatttaaaacctttaaaagatggcgtgtgtaaagttggccctctgccatgtttttccctttctgttctgatcttttacacaatctgtgcactttttgcatttatgtggtattatctctgtaaaagaaaaaaaaacggggcaatgattgtggacgacgatattgttccagaatcaggttccttagatgaatcagagacgaatgtattcgaaagtttcaataatgaaactaacttttttaatggtaaactcgctaacctatttacgaaagtgggacaattttccgttgaaaacccctacaagatattaataaccactgtttttagtatctttgtattcagtttcatcatatttcagtacgctactcttgaaacagatccaattaatttgtgggtgagtaaaaattctgaaaaattcaaagaaaaagagtacttcgatgataattttgggccattttacaggacagagcaaatatttgttgtgaatgagacaggccctgtgttatcatatgagacacttcactggtggtttgacgttgaaaattttattacggaagagctacaatcgtcagaaaatattggataccaagatctctgcttcagaccaacagaagattctacatgcgtaatagagtcttttactcagtattttcagggggccttaccaaacaaggatagctggaaaagggaactgcaggaatgtgggaaatttcctgtaaactgtctacctactttccagcaacctctaaaaactaatcttcttttcagtgacgatgatattctcaatgcgcatgcgtttgttgtaacacttctattgaccaaccacactcaatcagctaatcgctgggaagaaagattggaagagtatttattggatttaaaggtccccgagggcctgaggatcagttttaataccgaaatatccttggaaaaagagcttaataataataatgatatctcgaccgttgcaatatcatacctgatgatgtttttatatgctacatgggccttgaggagaaaggatgggaaaactaggttgttacttggaatatctggtttactcatagttttggcttctattgtttgtgcagccggatttttaactctttttggtttgaagtcgacattgatcatagcagaagtaataccgtttctaattttagcaataggaatagataatattttcttgattacacatgagtatgatagaaattgcgagcaaaaaccggagtattcaattgatcaaaaaataataagcgctatcgggagaatgtctccttccattttaatgtcattgctatgtcaaaccggatgcttcttgatagctgcatttgttacaatgccagctgtccataattttgctatatattccacagtttctgttatattcaacggagtattacagctaacagcgtatgtgtccattttgtctctctacgaaaagagatccaattataaacaaattaccggaaatgaagaaactaaggaatcatttttgaaaacgttttattttaagatgttaacgcaaaagaggctcataatcattatcttctcggcttggtttttcacatctctggttttcttaccagaaattcaatttgggctagatcaaacattggctgttccacaggattcctacctggttgactattttaaggatgtttatagcttcctaaacgtaggaccaccggtttacatggtcgtgaagaatttagatttgactaaaagacaaaaccaacagaaaatatgtggtaaatttacaacttgcgaaagagactcattagctaatgtactggagcaagaaagacacaggtcaacaattacggagccattggctaattggctggacgattatttcatgtttttaaatcctcaaaacgaccagtgttgtagattaaagaagggaacagatgaggtttgtcctccctcttttccaagtagacgttgtgaaacttgtttccagcagggttcttggaattacaacatgtcagggtttcctgagggcaaggacttcatggaatacctaagcatatggattaatgcgcctagtgacccctgccctctaggtggtcgtgcgccatattcgactgcgttagtttataatgaaacgagtgtgtctgcgtcagttttcagaacagctcatcatcctttgagatcccaaaaggactttatccaggcgtatagtgatggagttaggatatcaagttctttccccgaactagatatgtttgcatactcgccgttttacattttttttgttcaatatcaaactttgggaccattgacgttgaagctaatagggagtgccattatcctaatttttttcatttcatctgttttcttgcagaatatacgcagctcattcttactggctttggtcgttaccatgattatcgtagatattggtgctttgatggccctactaggtatctcactcaacgctgtcagtttagtcaatttaattatttgtgtcggtttgggtgtcgagttttgtgttcatattgttagatcatttacagtggtccccagtgaaaccaagaaagacgcaaactcaagagttctctattccttgaataccataggtgagtccgtcatcaaaggtataactctaaccaaattcattggagtttgtgtacttgcattcgcccaatcgaaaatatttgatgtattttactttagaatgtggtttacactaatcattgtagcagcattgcatgctctcctatttttacctgctttactttcattgtttggtggtgaaagctatagggacgattccatcgaagcagaagattag

SEQ ID NO: 11420 - DNA, 3513 bp, Artificial Sequence
  Description of Artificial Sequence: Synthetic polynucleotide
atgaatgtgttgtggattatagcattggttggccagttgatgaggctcgttcagggaacagctacctgtgccatgtatgggaactgtgggaaaaagagtgtatttggaaacgaattaccttgccctgtgccacgtagttttgaacctcctgttctttctgatgaaacaagcaaacttttggttgaagtttgtggtgaagagtggaaagaggtccgttatgcctgctgtactaaagatcaagtggtagcattgagagataacttacaaaaggctcaacctttaatttccagttgcccagcatgcctcaagaattttaataacttgttctgtcacttcacttgcgctgctgaccaaggaaggtttgtcaatattaccaaggtagaaaagagtaaagaagataaagatattgttgcggaattagacgttttcatgaattcttcttgggcatctgaattttatgactcttgtaagaatattaaattttctgctaccaacggttatgcgatggacttgatcggaggtggtgctaaaaattacagtcaattcttgaagtttttgggggatgctaaacctatgcttggtggatccccctttcagattaattacaagtatgatttagcaaatgaagaaaaagaatggcaggaatttaatgatgaggtttatgcttgcgatgatgctcaatataaatgtgcgtgttctgattgtcaagagtcttgcccccatttaaaacctttaaaagatggcgtgtgtaaagttggccctttaccatgtttttccctttctgttttgatcttttacacaatctgtgcactttttgcatttatgtggtattatctctgtaaaagaaaaaaaaacggggcaatgattgtggacgacgatattgttccagaaagtggttccttagatgaaagtgagacgaatgtattcgaaagtttcaataatgaaactaacttttttaatggtaaactcgctaacttgtttacgaaagtgggacaattttccgttgaaaacccctacaagatattaataaccactgtttttagtatctttgtattcagtttcatcatatttcagtacgctactcttgaaacagatccaattaatttgtgggtgagtaaaaattctgaaaaattcaaagaaaaagagtacttcgatgataattttgggccattttacaggacagagcaaatatttgttgtgaatgagacaggccctgtgttatcttatgagacacttcactggtggtttgacgttgaaaattttattacggaagagttacaatcttctgaaaatattggataccaagatctctgcttcagaccaacagaagattctacatgcgtaatagagtcttttactcagtattttcagggggccttaccaaacaaggatagctggaaaagggaattacaggaatgtgggaaatttcctgtaaactgtttacctactttccagcaacctttgaaaactaatcttcttttcagtgacgatgatattctcaatgcgcatgcgtttgttgtaacacttttattgaccaaccacactcaatctgctaatcgctgggaagaaagattggaagagtatttattggatttaaaggtccccgagggcttgaggatcagttttaataccgaaatatccttggaaaaagagcttaataataataatgatatctccaccgttgcaatatcttacttgatgatgtttttatatgctacatgggccttgaggagaaaggatgggaaaactaggttgttacttggaatatctggtttactcatagttttggcttctattgtttgtgcagccggatttttaactctttttggtttgaagagtacattgatcatagcagaagtaataccgtttttgattttagcaataggaatagataatattttcttgattacacatgagtatgatagaaattgcgagcaaaaaccggagtattctattgatcaaaaaataataagcgctatcgggagaatgtctccttccattttaatgtctttgttatgtcaaaccggatgcttcttgatagctgcatttgttacaatgccagctgtccataattttgctatatattccacagtttctgttatattcaacggagtattacagttgacagcgtatgtgtccattttgtctctctacgaaaagagatccaattataaacaaattaccggaaatgaagaaactaaggaaagttttttgaaaacgttttattttaagatgttaacgcaaaagaggctcataatcattatcttcagtgcttggtttttcacatctttggttttcttaccagaaattcaatttgggttagatcaaacattggctgttccacaggattcctacttggttgactattttaaggatgtttatagcttcttgaacgtaggaccaccggtttacatggtcgtgaagaatttagatttgactaaaagacaaaaccaacagaaaatatgtggtaaatttacaacttgcgaaagagactctttagctaatgtattggagcaagaaagacacaggtctacaattacggagccattggctaattggttagacgattatttcatgtttttaaatcctcaaaacgaccagtgttgtagattaaagaagggaacagatgaggtttgtcctccctcttttccaagtagacgttgtgaaacttgtttccagcagggttcttggaattacaacatgagtgggtttcctgagggcaaggacttcatggaatacttgagcatatggattaatgcgcctagtgacccctgccctttaggtggtcgtgcgccatattctactgcgttagtttataatgaaacgagtgtgtctgcgtccgttttcagaacagctcatcatcctttgagatcccaaaaggactttatccaggcgtatagtgatggagttaggatatctagttctttccccgaattagatatgtttgcatactctccgttttacattttttttgttcaatatcaaactttgggaccattgacgttgaagttaatagggagtgccattatcttgatttttttcatttcttctgttttcttgcagaatatacgcagctctttcttattagctttggtcgttaccatgattatcgtagatattggtgctttgatggccttgttgggtatctctctcaacgctgtcagtttagtcaatttaattatttgtgtcggtttgggtgtcgagttttgtgttcatattgttagatcttttacagtggtccccagtgaaaccaagaaagacgcaaactctagagttctctattccttgaataccataggtgagtccgtcatcaaaggtataactttgaccaaattcattggagtttgtgtacttgcattcgcccaaagtaaaatatttgatgtattttactttagaatgtggtttacattgatcattgtagcagcattgcatgctctcttatttttacctgctttactttctttgtttggtggtgaaagctatagggacgattccatcgaagcagaagattga

SEQ ID NO: 11421 - DNA, 1821 bp, Saccharomyces cerevisiae
atgaatacattaaggtgtttgacacaagcactatccaaaagtgggagagaagctccaaaactatatcagaaagtaatatttccaggcctgttcagagagggtataccaattgcaaatgtcaagaaagttgatgaaaaaataatagatagcccaacatcaacgtcagttaatggagaggcaaaaaaaatagtacggcatggtgtgaagtatgaaagggagcaagttaaggaatacctttcaagcctgccgactttaacgctttctaggaaacaaattagggatgactatgatgaggaacgtgcaaaacgaatgtatatgttctctaaacaaacgaattcctcgaataaattccagaaacttcttacagcaaagtctcaagagtttactagagaactattgacgctactgatagattgcacatcgaatgagaagaattcagggccagaacgcttcactcgtaagtttcttaagtttagtaatgacgagatccctcctctccctgacttttcaaagaaccctcaattgtttgaaaattatattggaatactaagtcatacaaagttcaattttcgttcatcttccaaactaaatggtattgtgcgtaagatgctgcggcacctacttcatccaaccaataagacgactctgccgttgcgttctgctcaagtttataatgactcaatatactttttcagtgagcacttcgactttgcgtcttgtagagaaatatttgcacaaatgaaggctgaggggactaaaccaaatacaatcacttttaatcttttactgcgtaatgtagtgaaaaactcgcatattagaaaaacgaagcaccctgacgatgaggtccttttttatcttagaagtatgcgtaatcatggagtttttgcagatgtaataacttggacgacatgttataactttcttcgtgatgaagtttcgagacaattgtacattgttcaaatgggtgaacatttaggaaattttaacgtaaattttgtttatactgtgctaaggaacggagattatagagcagaggactgtttaaaagttttagcagcaaattcactaccgatttcccgtaagacgttctatctgtgcatagaacgactactaaacgaggaacaacttgaaaccgcatctaaattacttgactatggttttcagcacttgaaaagtaattttaagttggactcggaggcaatgaatcatttcatgcgggtatttgctaataagggaagaagtgatttggcattcctttgctataatacttgtcgtaagatttacaaaattaaacctgattctcagacgttcgaaatgttatttaaagcgttagttaggaatggcaacaccaagaattttggggcagtcctacagtatatcaaagacttaaaggttagtgaaggatttggattgcggacaagttattggagaaccaaagcagactcaattttcaaatttggtagtcctaatacgctatcagaaaagtcaattgaaaaagcaagaaaattgttgggcaacctgattgcttccgagggtgagttctcttggaaaatttggaaagaaagtgattcttcacaaaaaaaaatactacgttttttgggttgtatccccactactttacgctgcaccaatacagcacaagatcatcagaagcccacaaacctaccctcaaacatttcccagaaaaaaagagaatatcgaaatcgggttaaagcaatagccacaaaggctgctttggaaaaaagaatggcgtatatcaaagacaatgatgtagctttcaaaaaagagctagtaaagaggagaatagttggggaggtttga

SEQ ID NO: 11422 - DNA, 1821 bp, Artificial Sequence
  Description of Artificial Sequence: Synthetic polynucleotide
atgaatacattaaggtgtttgacacaagcattgtccaaaagtgggagagaagctccaaaactttatcagaaagtaatatttccaggccttttcagagagggtataccaattgcaaatgtcaagaaagttgatgaaaaaataatagatagcccaacaagtacgtctgttaatggagaggcaaaaaaaatagtaagacatggtgtgaagtatgaaagggagcaagttaaggaatacctttctagcttaccgactttaacgctttctaggaaacaaattagggatgactatgatgaggaacgtgcaaaaagaatgtatatgttctctaaacaaacgaattcctctaataaattccagaaacttcttacagcaaagtctcaagagtttactagagaattattgacgttattgatagattgcacaagtaatgagaagaatagtgggccagaacgcttcactcgtaagtttcttaagtttagtaatgacgagatccctcctctccctgacttttccaagaaccctcaattgtttgaaaattatattggaatattgagtcatacaaagttcaattttcgttcttcttccaaattgaatggtattgtgcgtaagatgttgagacacttacttcatccaaccaataagacgactttaccgttgcgttctgctcaagtttataatgacagtatatactttttcagtgagcacttcgactttgcgtcttgtagagaaatatttgcacaaatgaaggctgaggggactaaaccaaatacaatcacttttaatcttttattacgtaatgtagtgaaaaactctcatattagaaaaacgaagcaccctgacgatgaggtccttttttatcttagaagtatgcgtaatcatggagtttttgcagatgtaataacttggacgacatgttataactttcttcgtgatgaagtttctagacaattgtacattgttcaaatgggtgaacatttaggaaattttaacgtaaattttgtttatactgtgttaaggaacggagattatagagcagaggactgtttaaaagttttagcagcaaattctttaccgatttcccgtaagacgttctatttgtgcatagaaagattattaaacgaggaacaacttgaaaccgcatctaaattacttgactatggttttcagcacttgaaaagtaattttaagttggactctgaggcaatgaatcatttcatgagagtatttgctaataagggaagaagtgatttggcattcctttgctataatacttgtcgtaagatttacaaaattaaacctgattctcagacgttcgaaatgttatttaaagcgttagttaggaatggcaacaccaagaattttggggcagtcttacagtatatcaaagacttaaaggttagtgaaggatttggattgagaacaagttattggagaaccaaagcagacagtattttcaaatttggtagtcctaatacgttatctgaaaagtctattgaaaaagcaagaaaattgttgggcaacttgattgcttccgagggtgagttctcttggaaaatttggaaagaaagtgattcttctcaaaaaaaaatattacgttttttgggttgtatccccactactttacgctgcaccaatacagcacaagatcatcagaagcccacaaacttgccctctaacatttcccagaaaaaaagagaatatagaaatagagttaaagcaatagccacaaaggctgctttggaaaaaagaatggcgtatatcaaagacaatgatgtagctttcaaaaaagagttggtaaagaggagaatagttggggaggtttga

SEQ ID NO: 11423 - DNA, 1026 bp, Saccharomyces cerevisiae
atgcacagaacttactctttaagaaatcaaagagctccaacggctgctgagctacaagctcctccaccaccaccatcctcaacgaagtccaagttcttcggaaaggcctctattgcgtctagttttagaaaaaatgcggctggtaactttgggccagagttggctcgtaaattatctcaattggttaagactgaaaaaggtgtccttagagctatggaagttgttgccagcgaacgccgtgaagctgcaaagcaactgtctctatggggtgctgacaatgatgatgatgtttccgacgtaaccgacaaattaggcgtcttaatatatgagttgggtgaactacaggaccagttcatcgataaatatgatcaatacagagtcacattaaaatcaattaggaacattgaagcctctgttcaaccttcgagagatcgtaaggaaaagatcacagatgaaattgcccatttgaaatataaagatcctcaatcaacaaaaatcccagttttagagcaagaactagttcgtgccgaagctgaatctttggttgcggaggctcaattatcgaatatcacacgtgaaaaattaaaggctgcttatagttatatgtttgattcattaagagagctttctgaaaaatttgccctgattgctggatacggaaaggccttattggagctgctagatgactctcctgtcactccaggtgaagctagaccagcgtacgatggctatgaagcttctcgccaaattattatggatgctgaatcggccttggaatcttggaccctagacatggctgcagtcaaaccaactctttcatttcatcagaccgttgatgacgtctatgaagacgaagatggtgaagaagaagaagaacctgaaatccaaaatggagatatccccggtcaagtagtcgaagaagaggaagttgaatggactactgaagttcctgtagatgatgaagcccatgaggccgatcatcatgttagtcaaaacggtcatacctccggttctgaaaacatctga

SEQ ID NO: 11424 - DNA, 1026 bp, Artificial Sequence
  Description of Artificial Sequence: Synthetic polynucleotide
atgcacagaacttactctttaagaaatcaaagagctccaacggctgctgagttacaagctcctccaccaccaccatcctctacgaagtccaagttcttcggaaaggcctctattgcgtctagttttagaaaaaatgcggctggtaactttgggccagagttggctcgtaaattatctcaattggttaagactgaaaaaggtgtccttagagctatggaagttgttgccagcgaacgccgtgaagctgcaaagcaattatctctttggggtgctgacaatgatgatgatgtttccgacgtaaccgacaaattaggcgtcttaatatatgagttgggtgaattacaggaccagttcatcgataaatatgatcaatacagagtcacattaaaatccattaggaacattgaagcctctgttcaaccttccagagatcgtaaggaaaagatcacagatgaaattgcccatttgaaatataaagatcctcaaagtacaaaaatcccagttttagagcaagaattggttcgtgccgaagctgaatctttggttgcggaggctcaattatccaatatcacacgtgaaaaattaaaggctgcttatagttatatgtttgattctttaagagagctttctgaaaaatttgccttaattgctggatacggaaaggccttattggagttattagatgactctcctgtcactccaggtgaagctagaccagcgtacgatggctatgaagcttctcgccaaattattatggatgctgaaagtgccttggaatcttggaccttagacatggctgcagtcaaaccaactctttcttttcatcagaccgttgatgacgtctatgaagacgaagatggtgaagaagaagaagaacctgaaatccaaaatggagatatccccggtcaagtagtcgaagaagaggaagttgaatggactactgaagttcctgtagatgatgaagcccatgaggccgatcatcatgttagtcaaaacggtcatacctccggttctgaaaacatctga

SEQ ID NO: 11425 - DNA, 1389 bp, Saccharomyces cerevisiae
atggaaagatatgatagacagctgagactatggggagcattgggccaagatagtttgaaccggtcccgtgtgtgcgtggtaggacctgctacacctttgctgcaggaagtttttaagaatctggtgcttgccggaatatcatctcttacttggctcaaagtagagtgtgcagttcaatcgggttctctgtttttagcagagcttaaaaaagatcttgagccattggcttctaaacagctagaatatgaggaaaatgaccttagaaagacgttacagcaacctcagtatgattggacccgcttctcggtggtgatcttgacttgtattggtgagcaaactgcgatgctcgatttaaatgagattaggcggcagagaggaacaaagtttccgcctgttctaaacactttcgtctctggattttatggatatatatatctggtactctcagaaacacattttgttttgcaagcacacccagatagtaagaagtatgatttacggttacagaacccttggcctgaactaataaattacgtagatacatttgacctaagtaaaatggatacagccacgttttctggtattccatatactgttttgctcatgaagtgtattgcaaaacttgaaagggatggtaataatgggaggataacgattgatcagatgaagaaagttttagaccaaatttgccttcctttagggaatgatgttatctacgaacccaattatgtggaagctaaacgctatgcttacttggcctgctctcaaaatgattgttgtaaagaactggaagatctgctccgaaatttggaaatatcagattatgggaacgattggcatgatacttataactacgagattctcacactattattgactttgaaaaatattgctaaagagaatggggagctcagctttcaacctttaacgggcactctcccagatatggagtcaacaacggaaaattatatcagactcaagaaactgtatgaagtaaaagcaaagcttgacaagtctcgtgtggaggaaagtttggctcgcagtaaaaaaatagtttcacaggatgtcttggagacattttgttctcattacggggaggtcaggaaaatattgccgccaaaaagtgacttgttaggtatttttagcacctcgaatgcccttttagatgcattagttatggtccaattctgggagcaaccggcagtaactgcagaggataaagatgagtttattggtttacgagtcgacgataactattccgtaatggccttttttggaggtgcagtggttcaagaggctataaagcttatcacacaccattacgttcctattgataacctatttttatataatggcattaataattcatccgcaacatataaaatataa

SEQ ID NO: 11426 - DNA, 1389 bp, Artificial Sequence
  Description of Artificial Sequence: Synthetic polynucleotide
atggaaagatatgatagacagttaagattatggggagcattgggccaagatagtttgaacagatcccgtgtgtgcgtggtaggacctgctacacctttgttacaggaagtttttaagaatttggtgcttgccggaatatcttctcttacttggctcaaagtagagtgtgcagttcaatctggttctttatttttagcagagcttaaaaaagatcttgagccattggcttctaaacagttagaatatgaggaaaatgaccttagaaagacgttacagcaacctcagtatgattggacccgcttctctgtggtgatcttgacttgtattggtgagcaaactgcgatgctcgatttaaatgagattaggaggcagagaggaacaaagtttccgcctgttttgaacactttcgtctctggattttatggatatatatatttggtactctctgaaacacattttgttttgcaagcacacccagatagtaagaagtatgatttaagattacagaacccttggcctgaattgataaattacgtagatacatttgacttgagtaaaatggatacagccacgttttctggtattccatatactgttttgctcatgaagtgtattgcaaaacttgaaagggatggtaataatgggaggataacgattgatcagatgaagaaagttttagaccaaatttgccttcctttagggaatgatgttatctacgaacccaattatgtggaagctaaacgctatgcttacttggcctgctctcaaaatgattgttgtaaagaattggaagatttactcagaaatttggaaatatctgattatgggaacgattggcatgatacttataactacgagattctcacattattattgactttgaaaaatattgctaaagagaatggggagctcagctttcaacctttaacgggcactctcccagatatggagtctacaacggaaaattatatcagactcaagaaactttatgaagtaaaagcaaagcttgacaagtctcgtgtggaggaaagtttggctcgcagtaaaaaaatagtttctcaggatgtcttggagacattttgttctcattacggggaggtcaggaaaatattgccgccaaaaagtgacttgttaggtatttttagcacctctaatgcccttttagatgcattagttatggtccaattctgggagcaaccggcagtaactgcagaggataaagatgagtttattggtttaagagtcgacgataactattccgtaatggccttttttggaggtgcagtggttcaagaggctataaagcttatcacacaccattacgttcctattgataacttgtttttatataatggcattaataattcttccgcaacatataaaatatga

SEQ ID NO: 11427 - DNA, 702 bp, Saccharomyces cerevisiae
atgaaacagtttggactggcagcctttgacgagttgaaggatggaaagtacaatgacgtaaacaaaaccatacttgaaaagcaatctgtcgaactaagggaccaattaatggtattccaagaacgactggtagaatttgccaagaaacacaatagcgagcttcaagcttcacctgaattccgctcaaaattcatgcatatgtgctcatctattgggattgatcccctatctttatttgatcgagataagcacttatttacagtgaatgatttttattatgaagtatgtcttaaagttatagaaatttgtcggcaaactaaagatatgaatggaggcgtcatttcttttcaagagttggagaaggtgcattttcgtaagctgaatgttggactcgatgatttggaaaaatctatcgacatgctaaagagcctagagtgttttgagatatttcaaattcgcggcaaaaagtttttacgaagtgttccaaatgagttgacatcagatcaaacaaagattttggaaatatgctcaattctgggctactcaagtatctctttattaaaggcaaacttgggatgggaggctgttaggagtaaatctgctcttgatgaaatggtcgctaacggtttattgtggattgattatcaaggtggtgcagaggcgttgtattgggatccctcttggattacgaggcaactgtga

SEQ ID NO: 11428 - DNA, 702 bp, Artificial Sequence
  Description of Artificial Sequence: Synthetic polynucleotide
atgaaacagtttggattagcagcctttgacgagttgaaggatggaaagtacaatgacgtaaacaaaaccatacttgaaaagcaatctgtcgaattgagggaccaattaatggtattccaagaaagattggtagaatttgccaagaaacacaatagcgagcttcaagcttcccctgaattccgctctaaattcatgcatatgtgctcttctattgggattgatcccttatctttatttgatagagataagcacttatttacagtgaatgatttttattatgaagtatgtcttaaagttatagaaatttgtagacaaactaaagatatgaatggaggcgtcatttcttttcaagagttggagaaggtgcattttcgtaagttgaatgttggactcgatgatttggaaaaatctatcgacatgttgaagagcttagagtgttttgagatatttcaaattcgcggcaaaaagtttttaagaagtgttccaaatgagttgacatctgatcaaacaaagattttggaaatatgctccattttgggctactctagtatctctttattaaaggcaaacttgggatgggaggctgttaggagtaaatctgctcttgatgaaatggtcgctaacggtttattgtggattgattatcaaggtggtgcagaggcgttgtattgggatccctcttggattacgaggcaattgtga

SEQ ID NO: 11429 - DNA, 1125 bp, Saccharomyces cerevisiae
atgtctgccaatgatttcaagcctgaaacgtggacttcaagcgccaacgaagccttaagagtttctatagttggagaaaacgctgttcagttttcaccattattcacgtatccaatttacggtgactccgaaaagatctacggctataaggatctcatcatccacctagcatttgattcagtaacattcaagccgtatgttaacgtcaagtattcagcaaaattaggagacgacaatattgtagacgtggaaaaaaaattactctcatttctaccaaaggatgatgtaattgttagggatgaagctaaatgggtagattgctttgcagaagaacgaaaaacacataatttatctgatgtttttgaaaaagtatcagagtattcgttgaatggggaagaatttgttgtatataaatcgagtttggttgacgattttgccaggagaatgcatcgtcgtgttcaaatcttttcattactttttatcgaagccgctaactatatagatgagactgacccgagttggcaaatctattggttgttgaacaagaaaacaaaagaattgattggtttcgtcactacttacaagtattggcactaccttggagcaaaatctttcgatgaggatatagataaaaaattcagagccaaaatatctcaatttctgatctttccaccttatcaaaataaaggccacggatcctgtctttatgaggctataatccaatcttggctagaagacaaaagtattactgaaattactgtagaggatccaaacgaagcatttgacgatcttcgcgacaggaatgatattcaaagactgcgaaaacttggttatgatgctgtctttcagaagcactccgacctttctgatgagtttttggagtcaagccgaaaatctttaaaactggaagaaagacagtttaatcgtcttgtggaaatgcttcttcttttaaacaattctccatcatttgaattaaaggtaaagaataggttgtacattaaaaattatgatgccctagatcaaactgatccagaaaaggcaagagaagctttacaaaattcatttattttagtcaaagatgattataggcgtattatagagtcgataaataaatctcaaggttaa

SEQ ID NO: 11430 - DNA, 1125 bp, Artificial Sequence
  Description of Artificial Sequence: Synthetic polynucleotide
atgtctgccaatgatttcaagcctgaaacgtggacttccagcgccaacgaagccttaagagtttctatagttggagaaaacgctgttcagttttctccattattcacgtatccaatttacggtgactccgaaaagatctacggctataaggatctcatcatccacttggcatttgattctgtaacattcaagccgtatgttaacgtcaagtattctgcaaaattaggagacgacaatattgtagacgtggaaaaaaaattactcagttttttaccaaaggatgatgtaattgttagggatgaagctaaatgggtagattgctttgcagaagaaagaaaaacacataatttatctgatgtttttgaaaaagtatctgagtattctttgaatggggaagaatttgttgtatataaatctagtttggttgacgattttgccaggagaatgcatcgtcgtgttcaaatcttttctttactttttatcgaagccgctaactatatagatgagactgacccgagttggcaaatctattggttgttgaacaagaaaacaaaagaattgattggtttcgtcactacttacaagtattggcactaccttggagcaaaatctttcgatgaggatatagataaaaaattcagagccaaaatatctcaatttttgatctttccaccttatcaaaataaaggccacggatcctgtctttatgaggctataatccaatcttggttagaagacaaaagtattactgaaattactgtagaggatccaaacgaagcatttgacgatcttcgcgacaggaatgatattcaaagattaagaaaacttggttatgatgctgtctttcagaagcactccgacctttctgatgagtttttggagagcagcagaaaatctttaaaattagaagaaagacagtttaatcgtcttgtggaaatgcttcttcttttaaacaattctccatcttttgaattaaaggtaaagaataggttgtacattaaaaattatgatgccttggatcaaactgatccagaaaaggcaagagaagctttacaaaattcttttattttagtcaaagatgattataggcgtattatagagagtataaataaatctcaaggttga

SEQ ID NO: 11431 - DNA, 1461 bp, Saccharomyces cerevisiae
atggtacaaaggcttctaccgggcgcacatatatgcagaaggtccttcaattcgtctgcaattataaagtcttctgcattgactctcaaggaagcattagaaaacgtgatacctaagaaaagagatgctgtgaagaaattgaaggcctgttatggcagcacgtttgtcggaccgattaccatttcatcagttctaggtgggatgagaggtaatcagtcaatgttttggcaaggaacatcattagatcccgaacatggcattaaatttcaaggtttaacgattgaagaatgtcaaaatagattacctaatacaggtattgatggcgataatttcctgccagaatcaatgttatggctgttgatgacaggtggtgtgccaactttccagcaagctgcttctttcaggaaagaattggctattcgtggaaggaaattgccacattatacagagaaagttttgtcaagtttacccaaagatatgcaccctatgacccaacttgcaattggtttagcatcaatgaacaaaggatccctctttgctacaaactaccaaaagggcctcataggaaagatggaattttggaaagatactcttgaagattcgctaaatttaattgcttcactcccgctgctgactgggagaatttattcgaacattacaaatgagggacacccattaggtcaatatagtgaggaggtggattggtgtacaaacatatgttccctgctcggcatgacaaatggaacgaactcttctaatacatgcaaccttacttcccagcaatccctggacttcataaacttgatgcggttatataccggtatacatgtagaccatgaaggtggtaatgtttctgctcacaccacccacttggttggaagtgcgttgagtgacccgtatctcagctattcatctggaataatgggattagcgggtcctttgcatgggttagcagcacaagaagtagtaaggtttctcatagagatgaactctaatatttccagcattgcacgagaacaagaaatcaaagattatctttggaaaattttgaattcaaaccgtgtgatccccggttatgggcacgcagttttgcgtaaaccggatcctcgatttacagcaatgcttgaatttgcgcaaaagaggcctattgaatttgagaacgacaagaacgttttgttgatgcaaaaattggcagaaatagcgcctaaggttttgttggaacacggaaagagtaagaatccatttcccaatgttgactctgcatcggggattttgttttatcattatggaatcagggaattattattctttaccgtcatttttgggtgttcaagggccatgggacccttgacacaacttgtttgggatcgcattctaggtttaccaattgaaaggcccaagagtttgaacttggagggtctggaagcacttaccaaagcaagcaatgttaacaagttgtaa

SEQ ID NO: 11432 - DNA, 1461 bp, Artificial Sequence
  Description of Artificial Sequence: Synthetic polynucleotide
atggtacaaaggcttttgccgggcgcacatatatgcagaaggtccttcaattcttctgcaattataaagtcttctgcattgactctcaaggaagcattagaaaacgtgatacctaagaaaagagatgctgtgaagaaattgaaggcctgttatggcagcacgtttgtcggaccgattaccatttcttctgttttaggtgggatgagaggtaatcagtccatgttttggcaaggaacaagtttagatcccgaacatggcattaaatttcaaggtttaacgattgaagaatgtcaaaatagattacctaatacaggtattgatggcgataatttcttaccagaaagtatgttatggttattgatgacaggtggtgtgccaactttccagcaagctgcttctttcaggaaagaattggctattcgtggaaggaaattgccacattatacagagaaagttttgagcagtttacccaaagatatgcaccctatgacccaacttgcaattggtttagcatctatgaacaaaggatccctctttgctacaaactaccaaaagggcctcataggaaagatggaattttggaaagatactcttgaagattctttgaatttaattgcttctctcccgttattaactgggagaatttattccaacattacaaatgagggacacccattaggtcaatatagtgaggaggtggattggtgtacaaacatatgttccttactcggcatgacaaatggaacgaactcttctaatacatgcaaccttacttcccagcaatccttggacttcataaacttgatgagattatataccggtatacatgtagaccatgaaggtggtaatgtttctgctcacaccacccacttggttggaagtgcgttgagtgacccgtatctcagctattcttctggaataatgggattagcgggtcctttgcatgggttagcagcacaagaagtagtaaggtttctcatagagatgaactctaatatttccagcattgcaagagaacaagaaatcaaagattatctttggaaaattttgaatagcaaccgtgtgatccccggttatgggcacgcagttttgcgtaaaccggatcctagatttacagcaatgcttgaatttgcgcaaaagaggcctattgaatttgagaacgacaagaacgttttgttgatgcaaaaattggcagaaatagcgcctaaggttttgttggaacacggaaagagtaagaatccatttcccaatgttgactctgcatctgggattttgttttatcattatggaatcagggaattattattctttaccgtcatttttgggtgttctagggccatgggacccttgacacaacttgtttgggatcgcattttgggtttaccaattgaaaggcccaagagtttgaacttggagggtttggaagcacttaccaaagcaagcaatgttaacaagttgtga

SEQ ID NO: 11433 - DNA, 1551 bp, Saccharomyces cerevisiae
atgtttttagccaaaaatctaaaaaataataaaatcaaggtatgcttgcctaaaaagaaatttgctgcgctgagtacagcgtctatacaaactaatgaaagaccaaatccagataaggttttgaaggacatcgcgaaatatgtccatgaaaccccattaaaatcatctttggctctagatacagcacgactctgtttccttgatactctaggctgtggcttggcggctttgaaatttaagcaggctcaaaatattattaaaccaattgtgccaggaacaatagttcccagtggaacaaaaatattgggcacatcttacgttatggatccagtgaagggagcttttgccattggtactctaatacgttggttagattacaatgactgctggttagctgccgagtgggggcacccatcagataaccttgggggaattttagctgtcgcggatcacttgtccagattaaacaaggctacccacggaaagaatggaaaacagtttcttgttaaagacgtattagaggcaatgattaaagcgcatgaaatccaaggtattatagcgctcgaaaattctttcaataaagtaggtttagatcatgtggtactcgtgaaagtagcaacggctggtgttgtctcgaagatgctgggcctgagccaggaacaaactattgaagcattgtcacaagcatttgtagacggtcaatcactgcgtacttaccgtcatgccccaaatactggatctagaaagtcgtgggcggcgggagatgcagtttcgagggctgtaaacttggcttatttagtcaaaaatgctaatgttggcacgataccttcagtattaacagctagaacctggggattttatgacgttttatttaagggtaaacctttttcattccaacaaagatcaaaatatgattcctacgtcatggaaaacgttctgttcaagatatcatttcctgccgaattccatgcgcaaactgctgtagaagctgctgtaaaagcatataggattcttgccaaacaagggaaaacttttaaagatattaaatcgatcagaattagaactcaagaggcggcaatgaggattatagataaatccggtcctctgtataattatgccgatagggatcattgtatccagtacatgatcgcggttccgctgattactggtaatctcacagctactgattattcggatgaggtcgcaagaaatcctgagatcgataacttgagatcgaaaatgtactgtatcgaagatactcatctcactcaaaactatcacgatcctgataaaaggtcgataggaaacgctcttctcatagagctgaacgatgggacgcagttggatgaaatttttgtagagtaccctgttggtcacaaatttagacgagaggaaggaataccattactaatgaataaatttcaaaggcatctgcgcgaacattttgtagagagccctgataaagtcgaccttataatgaaggtaagttcaaaaacaaactttttgaatatgcaaatcgacaaatacatggatttgtttactgagggatga

SEQ ID NO: 11434 - DNA, 1551 bp, Artificial Sequence
  Description of Artificial Sequence: Synthetic polynucleotide
atgtttttagccaaaaatttgaaaaataataaaatcaaggtatgcttgcctaaaaagaaatttgctgcgttaagtacagcgtctatacaaactaatgaaagaccaaatccagataaggttttgaaggacatcgcgaaatatgtccatgaaaccccattaaaatcttctttggctttagatacagcaaggctctgtttccttgatactttgggctgtggcttggcggctttgaaatttaagcaggctcaaaatattattaaaccaattgtgccaggaacaatagttcccagtggaacaaaaatattgggcacatcttacgttatggatccagtgaagggagcttttgccattggtactttgatacgttggttagattacaatgactgctggttagctgccgagtgggggcacccaagtgataaccttgggggaattttagctgtcgcggatcacttgtccagattaaacaaggctacccacggaaagaatggaaaacagtttcttgttaaagacgtattagaggcaatgattaaagcgcatgaaatccaaggtattatagcgctcgaaaattctttcaataaagtaggtttagatcatgtggtactcgtgaaagtagcaacggctggtgttgtctccaagatgcttggcttaagccaggaacaaactattgaagcattgtctcaagcatttgtagacggtcaaagtttacgtacttaccgtcatgccccaaatactggatctagaaagtcttgggcggcgggagatgcagtttccagggctgtaaacttggcttatttagtcaaaaatgctaatgttggcacgataccttctgtattaacagctagaacctggggattttatgacgttttatttaagggtaaacctttttctttccaacaaagaagtaaatatgattcctacgtcatggaaaacgttttgttcaagatatcctttcctgccgaattccatgcgcaaactgctgtagaagctgctgtaaaagcatataggattcttgccaaacaagggaaaacttttaaagatattaaatctatcagaattagaactcaagaggcggcaatgaggattatagataaatccggtcctttatataattatgccgatagggatcattgtatccagtacatgatcgcggttccgttgattactggtaatctcacagctactgattattctgatgaggtcgcaagaaatcctgagatcgataacttgagaagtaaaatgtactgtatcgaagatactcatctcactcaaaactatcacgatcctgataaaaggtctataggaaacgctcttctcatagagttgaacgatgggacgcagttggatgaaatttttgtagagtaccctgttggtcacaaatttagaagagaggaaggaataccattattgatgaataaatttcaaaggcatttacgcgaacattttgtagagagccctgataaagtcgaccttataatgaaggtaagttctaaaacaaactttttgaatatgcaaatcgacaaatacatggatttgtttactgagggatga

SEQ ID NO: 11435 - DNA, 2265 bp, Saccharomyces cerevisiae
atgacatcaaataattcgttattggggcgtggaaggatgtcatattcctctaccgctccaccaagattcaaaagatcagtcgaccagcgtgacactttctcggacaattttgattatgataaggattcatccaatcgaggcaggacctatattgcagcatctaattcaactactggggtacccccacccaacaactcaagatcaggatgcaccaataatacaaataatacaaataatacaagtaatacaagtaatacgaacaataatgatagcgttgatgagaatacagtgtttgaaactttaccttattacctgccctgcttttcatggcttcctgagtacactttcaataaactgtggggcgacgtaatcgcaggtatctcagtagcgtcatttcagataccacttgcgctatcgtacacaacttcaattgcacatgtcccacctttatgcggactatattctttggctattagcccatttgtctatggtattttaggttctgttcctcagatgatagttgggcccgaaagtgcaatttccttggtcgtgggacaagcagtcgaatctataacactacataaagaaaatgtttctctaattgatatttcaacagtaataacatttgttagtggcactatcctacttttttctggtatttccagatttggtttccttggaaatgttcttagcaaggcacttctacgaggtttcataagttcagtaggactggttatgataatcaactctttgatttctgaattaaagctagacaaatttttagtaagcttgcctcaacactaccatacccctttcgagaaaatacttttcctcattgattatgcaccagcacaataccatataccaacggcaatattcagcggatgttgcttgattgtcctctttttaacgcgtctactaaagaggaaattaatgaaatatcacaagagcgcaatattttttccagatatattattggtggtaattgttactattcttatttccatgaaatttaatttaaaacacagatatggtatttctatcattggcgactttagcatggacaattttgatgaattgaaaaaccctttaactcgtcctagacgtaagctaataccagatctttttagtgcatctctaatagtggcaatgttgggtttttttgaatctacgaccgcgtcgaaatctcttggaacaacttacaatcttaccgtttcctctaatagagaactagtagctttaggattcatgaatattgtcatctcattattcggtgctcttcccgcattcggcggatatggaagatccaagatcaacgccctatcaggagcacaaagcgtaatgtcgggagtgtttatgggtgtcatcaccctaatcacaatgaatttacttcttcaattcgtacattatattcctaattgtgttttatccgtcataacaaccatcatcggaattagtttattagaggaagtgccaggcgacataaagttccatttgcgatgtggtggctttagtgaactatttgtttttgctgttaccttctgcactacaatattttactcaatcgaagcaggaatatgcatcggatgtgtctattcaattataaatattataaagcattcagcaaagtcaagaatccaaattctggctagggtagcgggaacgtcgaactttacgaatcttgacgactacatgatgaacatgaaaaggaactctctggatgttgagggcacagaagaaatcgagggatgcatgattgttagaatacctgagcctctcacatttacaaacagcgaagatttaaaacagagacttgacagaatagagaggtacggttcgtctaagatacatcctggaaggaaatcacttcgctcgaaggattccataaaatatgtcattttcgatttaggtgggatgacctcaatagattcttcagccgcccaagtgctggaggaaattatcactagttacaagaggcgcaatgtctttatttaccttgtcaatgtatctataaatgacaaagtaagaaggcgattattcaaagcaggtgtagctgctagtgtggaaagagcgcaagcaaataacaacgaaaataatactagcaacacatttagtgatgcaggagagacatattctccgtacttcgatagcattgatgcggctctttatgaaattgagaaaatgaaaattaaagggaacaacgtcccgaacaatgattcggagagttttatgtccaatactttatttaattcaagtctagtgtaa

SEQ ID NO: 11436 - DNA, 2265 bp, Artificial Sequence
  Description of Artificial Sequence: Synthetic polynucleotide
atgacaagtaataattctttattggggcgtggaaggatgtcttattcctctaccgctccaccaagattcaaaagatctgtcgaccagcgtgacactttcagtgacaattttgattatgataaggattcttccaatagaggcaggacctatattgcagcatctaattctactactggggtacccccacccaacaactctagatctggatgcaccaataatacaaataatacaaataatacaagtaatacaagtaatacgaacaataatgatagcgttgatgagaatacagtgtttgaaactttaccttattacttgccctgcttttcttggcttcctgagtacactttcaataaattatggggcgacgtaatcgcaggtatctctgtagcgtcttttcagataccacttgcgttatcttacacaacttctattgcacatgtcccacctttatgcggattgtattctttggctattagcccatttgtctatggtattttaggttctgttcctcagatgatagttgggcccgaaagtgcaatttccttggtcgtgggacaagcagtcgaatctataacattgcataaagaaaatgtttctttgattgatatttctacagtaataacatttgttagtggcactatcttacttttttctggtatttccagatttggtttccttggaaatgttcttagcaaggcacttttaagaggtttcataagttctgtaggattggttatgataatcaactctttgatttctgaattaaagttggacaaatttttagtaagcttgcctcaacactaccatacccctttcgagaaaatacttttcctcattgattatgcaccagcacaataccatataccaacggcaatattcagcggatgttgcttgattgtcctctttttaacgcgtttgttgaagaggaaattaatgaaatatcacaagagcgcaatattttttccagatatattattggtggtaattgttactattcttatttccatgaaatttaatttaaaacacagatatggtatttctatcattggcgactttagcatggacaattttgatgaattgaaaaaccctttaactcgtcctagacgtaagttaataccagatctttttagtgcatctttgatagtggcaatgttgggtttttttgaatctacgaccgcgtccaaatctcttggaacaacttacaatcttaccgtttcctctaatagagaattggtagctttaggattcatgaatattgtcatctctttattcggtgctcttcccgcattcggcggatatggaagatccaagatcaacgccttgagtggagcacaaagcgtaatgtctggagtgtttatgggtgtcatcaccttaatcacaatgaatttacttcttcaattcgtacattatattcctaattgtgttttatccgtcataacaaccatcatcggaattagtttattagaggaagtgccaggcgacataaagttccatttgagatgtggtggctttagtgaattatttgtttttgctgttaccttctgcactacaatattttactctatcgaagcaggaatatgcatcggatgtgtctattctattataaatattataaagcattctgcaaagtctagaatccaaattttggctagggtagcgggaacgtccaactttacgaatcttgacgactacatgatgaacatgaaaaggaactctttagatgttgagggcacagaagaaatcgagggatgcatgattgttagaatacctgagcctctcacatttacaaacagcgaagatttaaaacagagacttgacagaatagagaggtacggttcttctaagatacatcctggaaggaaatctcttcgctctaaggattccataaaatatgtcattttcgatttaggtgggatgaccagtatagattcttctgccgcccaagtgttggaggaaattatcactagttacaagaggcgcaatgtctttatttaccttgtcaatgtatctataaatgacaaagtaagaaggagattattcaaagcaggtgtagctgctagtgtggaaagagcgcaagcaaataacaacgaaaataatactagcaacacatttagtgatgcaggagagacatattctccgtacttcgatagcattgatgcggctctttatgaaattgagaaaatgaaaattaaagggaacaacgtcccgaacaatgattctgagagttttatgtccaatactttatttaatagtagtttagtgtga

SEQ ID NO: 11437 - DNA, 1035 bp, Saccharomyces cerevisiae
atgtttaaatcattggctgctgtcttgcctagagctagcaaggcaaagttcctccagaaaaattacgcctccactttagctttcattgaaagctcaaaagatggctctgtttcaaggtcatcattgagtttattggctgctgcacaaaagttgtctaaccctatcacagctgtaatcacaggtagcaaagctgaaaaaactgctgaggcgctaaaatcttcatattcatgcagcaatttagaaaagcttgtcatatttgaagattcaaaattagatacctgtcttcccgaacaactaactccgttattagtgaaactattaaaaggcggcgactattcacattttgttgtctcaaactcctctgttggaaaaagtgttttacctcgggtgggtgcgctcttggacgtccaacctgtttgtgaggttactgtaatcaaagatcctaagacctttataaggccaatttatgcaggtaacattatttctacaatagaatgccaggcagaaaaaaaactgttgattattagggcatcagcttttccaccaattgcagagggtagtatggattctgttaccattgagaagagaactgatattcctccttgtgacttaaatgttacctgggttaaaactattcttaccaagagtgaaaggcctgaacttacttctgcacagaacgtggtaactggtggaagggcactcaaggataaggagacatttgagaagctattatcgccgctagcagatgttttgcacgctgctataggtgccacaagagcttctgttgataatggactatgtgataattctctacaaatcggtcagactggtaaggtagtcgcaccaaatttgtatatagccattggcgtttctggtgcagttcagcatttagcgggaatgaaggattcgaaagttatcgttgccattaacaatgatcctgatgcccctatatttaatgtcgctgactatgggttgcaaggggatctttacaaaatagtccctgaactaactgaaaaacttggtaaatataaataa

SEQ ID NO: 11438 - DNA, 1035 bp, Artificial Sequence
  Description of Artificial Sequence: Synthetic polynucleotide
atgtttaaatctttggctgctgtcttgcctagagctagcaaggcaaagttcctccagaaaaattacgcctccactttagctttcattgaaagcagtaaagatggctctgtttccaggagttctttgagtttattggctgctgcacaaaagttgtctaaccctatcacagctgtaatcacaggtagcaaagctgaaaaaactgctgaggcgttgaaatcttcttattcttgcagcaatttagaaaagcttgtcatatttgaagattctaaattagatacctgtcttcccgaacaattgactccgttattagtgaaattattaaaaggcggcgactattctcattttgttgtctccaactcctctgttggaaaaagtgttttacctagagtgggtgcgctcttggacgtccaacctgtttgtgaggttactgtaatcaaagatcctaagacctttataaggccaatttatgcaggtaacattatttctacaatagaatgccaggcagaaaaaaaacttttgattattagggcatctgcttttccaccaattgcagagggtagtatggattctgttaccattgagaagagaactgatattcctccttgtgacttaaatgttacctgggttaaaactattcttaccaagagtgaaaggcctgaacttacttctgcacagaacgtggtaactggtggaagggcactcaaggataaggagacatttgagaagcttttatctccgttggcagatgttttgcacgctgctataggtgccacaagagcttctgttgataatggattatgtgataattctttacaaatcggtcagactggtaaggtagtcgcaccaaatttgtatatagccattggcgtttctggtgcagttcagcatttagcgggaatgaaggattctaaagttatcgttgccattaacaatgatcctgatgcccctatatttaatgtcgctgactatgggttgcaaggggatctttacaaaatagtccctgaattgactgaaaaacttggtaaatataaatga

SEQ ID NO: 11439 - DNA, 885 bp, Saccharomyces cerevisiae
atgcatttcaaagatttaggattgcatgactacactctcaaaaacttgatgtatgagaataattgctgtaaattttatgatgccgtggatgaaaacaacatctcatatgttttaaaatttgttccctcagatgtgacttcggaaggggatactttcccattcgtggatcgctttcaagtaaaggaaggtgtttttttggtatattcctcaaatgactttggaaaagaaggtacggactactttacttatactggtagtggtggaaatgaggttcacatctcgggcacctcttcagaagcaggaataaaaccgcagtttattgaaacttgccatccaaaacatcttaagcggggaacaaaagagcaggaagatataaatagtagtacctcaaagaaaagtgcagttatcaacaatttttcgggtgaaaaaacaccaaatccaaggccacagagttccaacatttcagaaagagagacgtatgtcggaatattgaacgtcaaatgtaaaaataagaactcatcgaaaatacgaagtgaaaaattggtaagctccgtcatcgaaacaaagcatacgccaggattggcatctattttatcgaaagaaggcactacatatccgaataatgcggacgggaaacatatcagtatcgtgaatccatcctcaaaaatatatcattcatcccataaacagattgttaaaacgcctatccctaagagtggcctttctccaattgagagatgccctttcaatggtcaaaatattaaatgctactcaccaagaccactagatcatgaaagtccccaacgtgatttcaataataactttcagctgagaatactgaagagctcggtgttgcaaaggagacaatcaacacagaatagttga

SEQ ID NO: 11440 - DNA, 885 bp, Artificial Sequence
  Description of Artificial Sequence: Synthetic polynucleotide
atgcatttcaaagatttaggattgcatgactacactctcaaaaacttgatgtatgagaataattgctgtaaattttatgatgccgtggatgaaaacaacatcagttatgttttaaaatttgttccctctgatgtgacttctgaaggggatactttcccattcgtggatcgctttcaagtaaaggaaggtgtttttttggtatattcctctaatgactttggaaaagaaggtacggactactttacttatactggtagtggtggaaatgaggttcacatcagtggcacctcttctgaagcaggaataaaaccgcagtttattgaaacttgccatccaaaacatcttaagagaggaacaaaagagcaggaagatataaatagtagtacctccaagaaaagtgcagttatcaacaatttttctggtgaaaaaacaccaaatccaaggccacagagttccaacatttctgaaagagagacgtatgtcggaatattgaacgtcaaatgtaaaaataagaactcttctaaaataagaagtgaaaaattggtaagctccgtcatcgaaacaaagcatacgccaggattggcatctattttatccaaagaaggcactacatatccgaataatgcggacgggaaacatatcagtatcgtgaatccatcctctaaaatatatcattcttcccataaacagattgttaaaacgcctatccctaagagtggcctttctccaattgagagatgccctttcaatggtcaaaatattaaatgctactctccaagaccattagatcatgaaagtccccaacgtgatttcaataataactttcagttaagaatattgaagagctctgtgttgcaaaggagacaaagtacacagaatagttga

SEQ ID NO: 11441 - DNA, 1728 bp, Saccharomyces cerevisiae
atgattacaatgattaacaacaaaactttcaatagaaaaactacgggaacactgaagaagctggttttgtcatcagacaagtcactgcgaagatctttcaacggggcaagcagtactaaagacttcgtgttctcggaatcaagtaaagtagaagaatggtgggaatcagccagatttaagaatatcagtcgtccatactcagctacggatgttgtaaagcatcggggcagccttcctgctaatacttcaatttatccttcatcttatcaagctcgaaagctgttcaacttactagaagagaatttcaagaatggtactccacttcacacgttgggagttatcgatcctgtacaaatgagtcagttggcccgttgcagaaatatcaaagttgcttacatatctggttgggcttgttcttccacattagttggatctacaaatgaagtatcgccggattttggcgattatccatacgatactgtgccgaatcaagtggagagaatattcaaggcgcagcaattgcacgatcgaaaggctttcttggaggcctccatcaaaggttctactcctgttgattatttaaaaccaattatcgcggacgcagacatgggtcacggtggcccaacgactgtaatgaaagttgctaagttgtttgcggagaaaggggctgctggtattcatcttgaagatcagatggtgggaggcaaaaggtgtggccatctaagtggggctgttttggtgcccacagcaacacatcttatgagattgatttccaccaggtttcaatgggatatcatggggacagaaaatttggttattgcaagaacagattcctgtaatggtaagctgttgagttcaagcagtgatccgagagaccacgaattcattaggggtataataagagataacgtggtgccttggagcgaaaaattgattgagatggaggacaaaaaaattcccaactccgccattgctgacatggaaaaagaatggtaccatgaaaatgagctgtttacatttgaagaggccttagaaaagcagtttacggcaagcgagtttgaaagctataaagaaaagaaggaagaccttatggtaaacaagctgggtagagcatacctaagcttaagagaaatgaaacttttagctcaagaagtgacaccactaaagaaaattatatttgactgggatgctccgaggaccaaagagggatattacatgtttaacggttgtattgaagcagctattagaagatctttggtgtttgccccatattctgatatgatttggctggaaacgaaaactcctgacctggagcaggcacgctcattttcaagaaaaattcataaacaacttccagctaccaagctagtatataacttatctcctagtttcaattggagcgctcacggctttgatgataaggcattaaaatccttcgtatgggacttggcaaaagaaggcttcacgttgcaactggtttcccttgccggtctgcattcagatggagtatcattctgggaattagccaatagcttccaaagtgacggaatgaaagcatacgtcgaaaaagtgcaaaaacgggaaaaggagactaattgtgatatcatgacacaccagctatggtctggtgcagaatatgttgattccttaatgaaagttgtccaaaacggtgcttcatcccaaactttaagtacatctggtgagagctttaccgaaacgcaattttga

SEQ ID NO: 11442 - DNA, 1728 bp, Artificial Sequence
  Description of Artificial Sequence: Synthetic polynucleotide
atgattacaatgattaacaacaaaactttcaatagaaaaactacgggaacattgaagaagttggttttgagtagtgacaagtctttaagaagatctttcaacggggcaagcagtactaaagacttcgtgttctctgaaagtagtaaagtagaagaatggtgggaaagtgccagatttaagaatatcagtcgtccatactctgctacggatgttgtaaagcatcgtggcagccttcctgctaatacttctatttatccttcttcttatcaagctagaaagcttttcaacttattggaagagaatttcaagaatggtactccacttcacacgttgggagttatcgatcctgtacaaatgagtcagttggcccgttgcagaaatatcaaagttgcttacatatctggttgggcttgttcttccacattagttggatctacaaatgaagtatccccggattttggcgattatccatacgatactgtgccgaatcaagtggagagaatattcaaggcgcagcaattgcacgatagaaaggctttcttggaggcctccatcaaaggttctactcctgttgattatttaaaaccaattatcgcggacgcagacatgggtcacggtggcccaacgactgtaatgaaagttgctaagttgtttgcggagaaaggggctgctggtattcatcttgaagatcagatggtgggaggcaaaaggtgtggccatttgagtggggctgttttggtgcccacagcaacacatcttatgagattgatttccaccaggtttcaatgggatatcatggggacagaaaatttggttattgcaagaacagattcctgtaatggtaagttgttgagtagtagcagtgatccgagagaccacgaattcattaggggtataataagagataacgtggtgccttggagcgaaaaattgattgagatggaggacaaaaaaattcccaactccgccattgctgacatggaaaaagaatggtaccatgaaaatgagttatttacatttgaagaggccttagaaaagcagtttacggcaagcgagtttgaaagctataaagaaaagaaggaagaccttatggtaaacaagttgggtagagcatacttgagcttaagagaaatgaaacttttagctcaagaagtgacaccattgaagaaaattatatttgactgggatgctccgaggaccaaagagggatattacatgtttaacggttgtattgaagcagctattagaagatctttggtgtttgccccatattctgatatgatttggttagaaacgaaaactcctgacttggagcaggcacgctccttttccagaaaaattcataaacaacttccagctaccaagttggtatataacttatctcctagtttcaattggagcgctcacggctttgatgataaggcattaaaatccttcgtatgggacttggcaaaagaaggcttcacgttgcaattggtttcccttgccggtttgcattctgatggagtatctttctgggaattagccaatagcttccaaagtgacggaatgaaagcatacgtcgaaaaagtgcaaaaaagagaaaaggagactaattgtgatatcatgacacaccagttatggtctggtgcagaatatgttgattccttaatgaaagttgtccaaaacggtgcttcttcccaaactttaagtacatctggtgagagctttaccgaaacgcaattttga

SEQ ID NO: 11443 - DNA, 2043 bp, Saccharomyces cerevisiae
atggcacctctttcgttgaactttaaagatgacaagaaatataagggcctcacaacagtgtggttgctttctgcgttgggaaattccattgtaaaggaaagtaacaattattattcaaacaaaagcaactccactggaaacatatcttcatccaccgttaagaaaaaagacatcgtaaatatttccataccaaaaacatgtgatgaaattcaaaatttcgaaaatgatttttctcttagatacatttctaatcttttatatggagtgacaatttgctataataaaaaaaccgagtatgtgttgaatgacctaaatcacctgcttgtgcagttacaaaaaaatgatgtatacgcttttaaggccaaaaataagtctacgaggattaatggattgaatagtaataacagtattataggaaacaaaaacaataattacacctgggaagaatgcgtttttttcgatgacgatcccttatatgatattactaaagttcccgcactggagtttcttaacactactctccaagataatgtatcttttattgaggaagctaaatcaataaggagacaagactacatcaatgagttaagtaattctaacaggttcgagcttcatggggacatgactaactcagacgcgcaaagtaatctaggatctaacgttagaaattcttttccgctggatgaaattcccgttgatgtggactttaacctggacttagatgatatagtgagccatcaggggacacctttaggctctcactcaagttcacagaaggatggaaacgatttcaagtttaattatcaaggagatgaattggtgttgaattttgagaacgataatgaaaataacagtaatggaggagaagatacatcagttgaaaatgaagggccggtagccaatctcaaagactacgaattggggttagaagcgcaggcttctgaagaagaaaacgatcttcaacagaaacttaacaccagaatgcaaagaggacatcgcgccgatgtaggtgggcaattttctaaggtacaatttgatgccaaaacgagttatccaaatgaagttctcaaattcaaccatggaaattacagtcacttaatggaaaaaaacaggattagaaaactaaccggccaaaattttctcacctctaacataagtagtttggtaaggtcatgtggtgaggaagaatttttttcaacaaattggttaagtatatttaacgacttttccaatataaagactagcgaatgggacttatatccccaaggttttagttcagttgaaagagggagaaaaagagcacattctttagtatcaacccaaagctcaagtagtaccagaagtcacgaatatggtaggaaaagttttcgcaataataagaacgataattattcttccgatatggaaaatgataatttacttttaaaccttgaacaaattaatgaggatttggaagatgggcactatattgaagaaaactctcaaggtaacatcctagattttaatttgaatctacctccttcaagttttggaagaagtcataccagaaactcaaccaggtctagtggtttcaatgaagatatagttggtgctctcagaaggagagtcgggccatctgaacagaattttgccgaggaagacgattccagcaacagttgtttttctgatggctctcagcaaaatttgcagcaggacaaaacaaattttcaagacgtcattctggattatcaaactaaaaaattctacgattacatcaaagaaagatcaattgttgtcggaagaacaacgcgctccaatccgcctttcaagagaaagatgctgttggttgacatcatcccaagccgcatgggcgaagctcaaacgggagctaactttgatgatgtagaaagaggtgtcagcagacagatagccgccagtgccttcctatccttactgaatttggctacgaaagggatggtcaagttgaacgaatatcctgttgcagatgcggtaactaaagatcttaaactgagaagagaggacgaaataattgtatatgcctga

SEQ ID NO: 11444 - DNA, 2043 bp, Artificial Sequence
  Description of Artificial Sequence: Synthetic polynucleotide
atggcacctctttctttgaactttaaagatgacaagaaatataagggcctcacaacagtgtggttgctttctgcgttgggaaattccattgtaaaggaaagtaacaattattattccaacaaaagcaactccactggaaacatatcttcttccaccgttaagaaaaaagacatcgtaaatatttccataccaaaaacatgtgatgaaattcaaaatttcgaaaatgatttttctcttagatacatttctaatcttttatatggagtgacaatttgctataataaaaaaaccgagtatgtgttgaatgacttgaatcacttacttgtgcagttacaaaaaaatgatgtatacgcttttaaggccaaaaataagtctacgaggattaatggattgaatagtaataacagtattataggaaacaaaaacaataattacacctgggaagaatgcgtttttttcgatgacgatcccttatatgatattactaaagttcccgcattagagtttcttaacactactctccaagataatgtatcttttattgaggaagctaaatctataaggagacaagactacatcaatgagttaagtaattctaacaggttcgagcttcatggggacatgactaacagcgacgcgcaaagtaatttaggatctaacgttagaaattcttttccgttagatgaaattcccgttgatgtggactttaacttggacttagatgatatagtgagccatcaggggacacctttaggctctcacagcagttctcagaaggatggaaacgatttcaagtttaattatcaaggagatgaattggtgttgaattttgagaacgataatgaaaataacagtaatggaggagaagatacatctgttgaaaatgaagggccggtagccaatctcaaagactacgaattggggttagaagcgcaggcttctgaagaagaaaacgatcttcaacagaaacttaacaccagaatgcaaagaggacatcgcgccgatgtaggtgggcaattttctaaggtacaatttgatgccaaaacgagttatccaaatgaagttctcaaattcaaccatggaaattacagtcacttaatggaaaaaaacaggattagaaaattgaccggccaaaattttctcacctctaacataagtagtttggtaaggagttgtggtgaggaagaatttttttctacaaattggttaagtatatttaacgacttttccaatataaagactagcgaatgggacttatatccccaaggttttagttctgttgaaagagggagaaaaagagcacattctttagtatctacccaaagcagtagtagtaccagaagtcacgaatatggtaggaaaagttttcgcaataataagaacgataattattcttccgatatggaaaatgataatttacttttaaaccttgaacaaattaatgaggatttggaagatgggcactatattgaagaaaactctcaaggtaacatcttagattttaatttgaatttacctccttctagttttggaagaagtcataccagaaactctaccaggtctagtggtttcaatgaagatatagttggtgctctcagaaggagagtcgggccatctgaacagaattttgccgaggaagacgattccagcaacagttgtttttctgatggctctcagcaaaatttgcagcaggacaaaacaaattttcaagacgtcattttagattatcaaactaaaaaattctacgattacatcaaagaaagatctattgttgtcggaagaacaacgcgctccaatccgcctttcaagagaaagatgcttttggttgacatcatcccaagccgcatgggcgaagctcaaacgggagctaactttgatgatgtagaaagaggtgtcagcagacagatagccgccagtgccttcttatccttattgaatttggctacgaaagggatggtcaagttgaacgaatatcctgttgcagatgcggtaactaaagatcttaaattgagaagagaggacgaaataattgtatatgcctga

SEQ ID NO: 11445 - DNA, 2085 bp, Saccharomyces cerevisiae
atggtcttgataaatggcataaagtatgcctgtgagaggtgcataagaggccatagagtaacaacatgcaatcatacagatcaaccgcttatgatgatcaaacccaaaggtagaccttccactacatgcgactattgtaaacaacttcgaaaaaacaagaatgcaaatcctgaaggtgtttgcacgtgtggccggctagagaagaaaaaactggcacagaaagccaaagaagaagcaagagctaaagccaaagaaaaacaaagaaaacagtgtacctgcgggactgatgaggtttgcaaatatcatgctcaaaagagacatctaagaaagtccccttcaagttctcaaaagaaaggaagatccatttctcgttctcaaccaatgtttgaaagggtattgtcttctacttcacttgacagcaatatgttatccggccacggagcactatcagatacctctagcatactgacgagcacatttttagacagtgagccgggtgttggtaaaatttcaaaagattaccatcatgtcccttcattggcctccatttcatccttacaatcctcgcaatcgttagatcaaaatttcagtataccacaaagcccgccgttatcttcaatgtcatttaattttctcacgggaaatatcaatgaaaccaaccaaaatcacagtaatcatcagcattcaaaatcaggcaataactggcaagatagttcggtaagcttgccagcgaaagctgattcacgtcttaacatgatggataaaaacaactctgtgggtcttgacctattaggccattcaaaacgaatatcgccgatatcaaactctcgtgtgggcgaagttagcgttccgctagaagaatatattccttctgacattgatggggttggaagagttactgataaaagctctttggtctacgattggccatttgatgaaagtattgagagaaatttcagtacaaccgcaaccgctgcaactggtgaaagtaagttcgacattaacgacaactgtaatagaattaatagcaaaagttatagtaagactaatagtatgaatggaaacggtatgaacaatagcaataataataatatcaacagtaatggcaacgacaagaacaataacaactcttctagacaagaacatcaaggaaatggactatttgacatgtttacagattcatcgtcgatttcaacgctttcccgtgcaaacttattattgcaagaaaaaattggttcgcaagaaaactctgtcaaacaagaaaactattcgaaaaatcctcaacttcgtcatcaattaacttccagaagtagatcatttattcatcatccggcaaacgagtatttgaagaatacttttggaaattcacatagtaatgacatcggaaagggagttgaagtgctatctttgacaccgagttttatggatattcccgaaaaagaaagagaaacggaaagatcgccatcatccaattacattactgacagacctttcactcgaaaacctagatcttctagcattgacgtaaaccataggtatccacctatggcaccaacaaccgtagcgacatctcccggtgcattgaacaatgccgtagcaagcaatctcgacgatcaactgagtttaacatcactaaactctcagccatcatcgatagcaaatatgatgatggacccttcaaacctagctgagcaaagttctattcattcagttcctcagtcaataaactctccgagaatgcctaaaactggaagtcgccaagacaagaacattcacactaagaaggaagaaagaaatccgctaaataacatacacgatctgtcacaattggaaaatgtaccagacgagatgaaccaaatgttctccccaccattaaaaagtatgaatagaccggatgccataagggaaaattcatctagtagtaatttcataatccaaggaaatagcatgatctctacgccttccggaaggaatgaccttccagatacctctccaatgagtagtattcaaacagcgtcaccaccaagtcaattactgaccgatcaaggatttgcggatttggataatttcatgtcttcgttatga

SEQ ID NO: 11446 - DNA, 2085 bp, Artificial Sequence
  Description of Artificial Sequence: Synthetic polynucleotide
atggtcttgataaatggcataaagtatgcctgtgagaggtgcataagaggccatagagtaacaacatgcaatcatacagatcaaccgcttatgatgatcaaacccaaaggtagaccttccactacatgcgactattgtaaacaacttagaaaaaacaagaatgcaaatcctgaaggtgtttgcacgtgtggcagattggagaagaaaaaattggcacagaaagccaaagaagaagcaagagctaaagccaaagaaaaacaaagaaaacagtgtacctgcgggactgatgaggtttgcaaatatcatgctcaaaagagacatttaagaaagtccccttctagttctcaaaagaaaggaagatccatttctcgttctcaaccaatgtttgaaagggtattgtcttctacttctcttgacagcaatatgttatccggccacggagcattaagtgatacctctagcatattaacgagcacatttttagacagtgagccgggtgttggtaaaatttccaaagattaccatcatgtcccttctttggcctccatttcttccttacaatcctctcaatctttagatcaaaatttcagtataccacaaagcccgccgttatcttctatgagttttaattttctcacgggaaatatcaatgaaaccaaccaaaatcacagtaatcatcagcattctaaatctggcaataactggcaagatagttctgtaagcttgccagcgaaagctgattctcgtcttaacatgatggataaaaacaactctgtgggtcttgacttattaggccattctaaaagaatatctccgataagcaactctcgtgtgggcgaagttagcgttccgttggaagaatatattccttctgacattgatggggttggaagagttactgataaaagctctttggtctacgattggccatttgatgaaagtattgagagaaatttcagtacaaccgcaaccgctgcaactggtgaaagtaagttcgacattaacgacaactgtaatagaattaatagcaaaagttatagtaagactaatagtatgaatggaaacggtatgaacaatagcaataataataatatcaacagtaatggcaacgacaagaacaataacaactcttctagacaagaacatcaaggaaatggattatttgacatgtttacagattcttcttccatttctacgctttcccgtgcaaacttattattgcaagaaaaaattggttctcaagaaaactctgtcaaacaagaaaactattctaaaaatcctcaacttcgtcatcaattaacttccagaagtagatcttttattcatcatccggcaaacgagtatttgaagaatacttttggaaattctcatagtaatgacatcggaaagggagttgaagtgttatctttgacaccgagttttatggatattcccgaaaaagaaagagaaacggaaagatctccatcttccaattacattactgacagacctttcactagaaaacctagatcttctagcattgacgtaaaccataggtatccacctatggcaccaacaaccgtagcgacatctcccggtgcattgaacaatgccgtagcaagcaatctcgacgatcaattgagtttaacatctttgaactctcagccatcttctatagcaaatatgatgatggacccttccaacttggctgagcaaagttctattcattctgttcctcagagtataaactctccgagaatgcctaaaactggaagtcgccaagacaagaacattcacactaagaaggaagaaagaaatccgttaaataacatacacgatttatctcaattggaaaatgtaccagacgagatgaaccaaatgttctccccaccattaaaaagtatgaatagaccggatgccataagggaaaattcttctagtagtaatttcataatccaaggaaatagcatgatctctacgccttccggaaggaatgaccttccagatacctctccaatgagtagtattcaaacagcgtctccaccaagtcaattattaaccgatcaaggatttgcggatttggataatttcatgtcttctttatga

SEQ ID NO: 11447 - DNA, 807 bp, Saccharomyces cerevisiae
atgaagccgaacaatcgaacttgtgatgtaattaccaacaaagatgaatctcttcctgcacttttgctgcctgcactgaacagttacacctgtgacgattcattgctaaaaggacaaatttcaagcaatggcagatatcaaccattcgggttttctgattgctctttactgccaaagcgtttaaacattcaggcagggcaaggatctatgccagtttcttcgattcaatgtgcagaccacagttatagtaattggcaaaaagaatccgaaaagactaagcttcccaagcttggttgcccaacagagtacactgaatactataaaactgtttcttccggcgaaacaaccgattcagcggttgtttcatctatagcaacgaacagactcaaaagaaaacgtcagagggacggcccaagttgtgactcttgtaggataaagaaaataaaatgcaatgcaacaatcattatctttttacaggataggaacctaatttcatcaatttcttcaaatttgcattatacactttcccaagacgacataaaccagtttcgaatgaagtttttcaggaaactgcctgacgtgatgggcacatatgaagtcataaaacaccttgataaaatagtccttttcaaagcctgcacctcttgcagtagaagaaaccaaaaaaatggaaagtgtcttttttcgagaggatttacaaaatctgatatgaacgtatttcccaagataaatagtaaacttaaagacaaaagtatcttcgagatgactgtcgatgattatgttgccgctggcttccaaaccctttag

SEQ ID NO: 11448 - DNA, 807 bp, Artificial Sequence
  Description of Artificial Sequence: Synthetic polynucleotide
atgaagccgaacaatagaacttgtgatgtaattaccaacaaagatgaatctcttcctgcacttttgttacctgcattgaacagttacacctgtgacgattctttgttgaaaggacaaatttctagcaatggcagatatcaaccattcgggttttctgattgctctttattaccaaagcgtttaaacattcaggcagggcaaggatctatgccagtttcttccattcaatgtgcagaccacagttatagtaattggcaaaaagaatccgaaaagactaagcttcccaagcttggttgcccaacagagtacactgaatactataaaactgtttcttccggcgaaacaaccgattctgcggttgtttcttctatagcaacgaacagactcaaaagaaaacgtcagagggacggcccaagttgtgactcttgtaggataaagaaaataaaatgcaatgcaacaatcattatctttttacaggataggaacttgatttcttccatttcttccaatttgcattatacactttcccaagacgacataaaccagtttagaatgaagtttttcaggaaattacctgacgtgatgggcacatatgaagtcataaaacaccttgataaaatagtccttttcaaagcctgcacctcttgcagtagaagaaaccaaaaaaatggaaagtgtcttttttccagaggatttacaaaatctgatatgaacgtatttcccaagataaatagtaaacttaaagacaaaagtatcttcgagatgactgtcgatgattatgttgccgctggcttccaaaccctttga

SEQ ID NO: 11449 - DNA, 3612 bp, Saccharomyces cerevisiae
atgagcaaagtgattaagccgcctggccaagccagaactgctgatttccgtaccttagaacgtgaatctaggttcatcaatccacctaaggataaatcagcatttccactattacaggaagctgttcaacctcatattgggtcttttaacgcattaacagaaggtccggatggaggtttgttaaatcttggtgttaaagacatcggtgaaaaagttatatttgatggaaaaccactcaattctgaagacgaaatatccaacagcggatacctcgggaataagctttctgttagtgtggaacaagtgtctattgcgaagccaatgtctaacgatggtgtttcttctgcagtagagagaaaagtttacccaagtgagtcaagacaaaggcttacttcttacagaggtaaattacttttaaagttgaagtggtccgtgaacaatggcgaggagaacttatttgaagtaagagattgtggtggtctaccagttatgctacagagtaacagatgtcacttgaacaagatgtcaccatatgaactggtacaacacaaggaagaatccgatgaaataggtggttatttcattgttaacggtatagaaaagcttattagaatgctgattgtgcaacgtagaaatcatcctatggctatcatcagaccttccttcgctaacaggggtgcatcctattctcattacggtattcaaattagatctgtcaggccggatcaaacttcccaaactaatgttttgcattacttaaatgacggtcaagttacatttagattttcttggagaaaaaatgaatatttagttcctgttgttatgattttaaaagccttgtgtcataccagcgatagggaaatttttgatggtattattggtaatgacgttaaggattcctttttgaccgatcgtttagaattactgttacgtggttttaagaaaagatatcctcatttacaaaatcgcacacaagtcttgcaatatttaggagacaaatttcgtgttgtctttcaagcttcccctgatcaatctgatttagaagtcggacaagaagtccttgatcgcatcgttctcgtgcatttgggtaaggatggcagccaggataaattcagaatgttattgttcatgatcagaaagttgtattccttggttgcaggcgaatgttctccagataacccagatgctacgcaacatcaagaagttcttttgggtggtttcttatatggtatgatcctaaaagaaaagattgatgagtacttacagaatattattgctcaagtcaggatggatattaaccgtggtatggccattaatttcaaagacaaaaggtacatgtcaagagttttaatgagggttaatgaaaacattggttccaaaatgcaatactttttatcaactggtaacctggtgtcccagtctgggttagatttacaacaagtttctggttatactgtggttgcagaaaaaattaacttctaccgttttatctctcattttagaatggttcatagaggctccttttttgcgcaattgaaaactaccacagtcagaaagttgctacctgagtcgtggggattcctgtgccctgttcatacaccagatggttctccttgtggtttattaaaccattttgcgcacaagtgtcgtatatcaactcagcaatctgacgtctcaagaattccttctatattatactcacttggtgttgctccggcatctcacacctttgctgctggtccttctctgtgttgtgttcaaattgatggtaaaattattggctgggtctctcatgaacaaggtaagatcattgcggatacattgagatattggaaagttgaaggcaagacgcctgggttaccgattgatctagaaattggatatgttcctccctcaactcgtggtcaatatccaggtctctacctatttggtggtcattctaggatgctgcgtcctgttcgttacctgcctttggataaagaagacattgttggaccttttgagcaagtgtacatgaacattgctgtcactcctcaagaaattcaaaataacgttcatacacacgtagaatttacgcccacaaatattctttctattttggctaatttgactccattttctgatttcaaccagtctccaagaaacatgtatcaatgtcagatgggtaaacaaacaatgggtactccgggtgtagctttgtgccatcgttccgacaataagctgtataggttgcaaacaggtcaaacgcctatcgtaaaagctaatttatatgatgattatggcatggataactttccaaacgggtttaatgctgttgttgcggtcatctcgtatactggttatgatatggatgatgcaatgattataaacaaatcagcagatgaaagaggtttcggttatggtactatgtataagactgagaaagtggatttagcacttaacagaaaccgtggtgacccaattacacagcattttggtttcgggaatgacgaatggccaaaggagtggcttgagaaattagacgaggatggtttgccatacattggcacttatgttgaagagggtgatccaatctgcgcatactttgacgatactttaaataagaccaaaatcaagacatatcactcctctgaaccagcatatatcgaagaggtaaatttaatcggtgatgaatccaataagttccaagaactacaaactgttagcataaaatatcgtattagaagaacgcctcaaattggtgataaattttcttctagacacggtcaaaaaggtgtttgttcaagaaaatggccaaccattgatatgccttttagcgaaacaggtatccaaccagacatcatcattaaccctcatgctttcccttcgcgtatgaccattggtatgttcgtcgaatctttagcaggtaaagcgggggcattgcatggtattgcacaggactctacaccttggatctttaacgaggacgataccccagccgattactttggtgagcaactagcgaaggcgggttacaactaccatggtaatgagccaatgtactcaggtgctactggtgaagaattaagggcagatatttatgttggtgttgtctactaccaaagattacgtcatatggtcaatgacaagttccaagttcgttccactggtcctgtgaatagtttgactatgcagcctgtcaaaggtagaaagagacatggtggtattcgtgtcggtgaaatggaaagagatgctttgattgggcatggtacatcttttctattacaagatcgtctgctaaattcatcagactacacacaggcatccgtatgtcgcgagtgtggttctattttgaccacgcaacagagtgtgccaagaattggttcgatttccaccgtttgttgccgtcgttgttccatgagattcgaagatgcaaagaagctattgactaaatcagaagatggagagaaaatttttattgacgactctcaaatttgggaagatggacaaggtaacaaatttgttggtggtaatgaaacaactacggtggccataccatttgtgttgaagtacttggactctgagctatccgcaatgggtataagattgcgttataatgtagagcccaaatag

SEQ ID NO: 11450 - DNA, 3612 bp, Artificial Sequence
  Description of Artificial Sequence: Synthetic polynucleotide
atgagcaaagtgattaagccgcctggccaagccagaactgctgatttccgtaccttagaacgtgaatctaggttcatcaatccacctaaggataaatctgcatttccattattacaggaagctgttcaacctcatattgggtcttttaacgcattaacagaaggtccggatggaggtttgttaaatcttggtgttaaagacatcggtgaaaaagttatatttgatggaaaaccactcaattctgaagacgaaatatccaacagcggatacctcgggaataagctttctgttagtgtggaacaagtgtctattgcgaagccaatgtctaacgatggtgtttcttctgcagtagagagaaaagtttacccaagtgagagcagacaaaggcttacttcttacagaggtaaattacttttaaagttgaagtggtccgtgaacaatggcgaggagaacttatttgaagtaagagattgtggtggtttgccagttatgttacagagtaacagatgtcacttgaacaagatgtctccatatgaattggtacaacacaaggaagaatccgatgaaataggtggttatttcattgttaacggtatagaaaagcttattagaatgttgattgtgcaacgtagaaatcatcctatggctatcatcagaccttccttcgctaacaggggtgcatcctattctcattacggtattcaaattagatctgtcaggccggatcaaacttcccaaactaatgttttgcattacttaaatgacggtcaagttacatttagattttcttggagaaaaaatgaatatttagttcctgttgttatgattttaaaagccttgtgtcataccagcgatagggaaatttttgatggtattattggtaatgacgttaaggattcctttttgaccgatcgtttagaattattattacgtggttttaagaaaagatatcctcatttacaaaatcgcacacaagtcttgcaatatttaggagacaaatttcgtgttgtctttcaagcttcccctgatcaatctgatttagaagtcggacaagaagtccttgatcgcatcgttctcgtgcatttgggtaaggatggcagccaggataaattcagaatgttattgttcatgatcagaaagttgtattccttggttgcaggcgaatgttctccagataacccagatgctacgcaacatcaagaagttcttttgggtggtttcttatatggtatgatcttgaaagaaaagattgatgagtacttacagaatattattgctcaagtcaggatggatattaaccgtggtatggccattaatttcaaagacaaaaggtacatgagtagagttttaatgagggttaatgaaaacattggttccaaaatgcaatactttttatctactggtaacttggtgtcccagtctgggttagatttacaacaagtttctggttatactgtggttgcagaaaaaattaacttctaccgttttatctctcattttagaatggttcatagaggctccttttttgcgcaattgaaaactaccacagtcagaaagttgttacctgagagttggggattcttgtgccctgttcatacaccagatggttctccttgtggtttattaaaccattttgcgcacaagtgtcgtatatctactcagcaatctgacgtctctagaattccttctatattatactctcttggtgttgctccggcatctcacacctttgctgctggtccttctttatgttgtgttcaaattgatggtaaaattattggctgggtctctcatgaacaaggtaagatcattgcggatacattgagatattggaaagttgaaggcaagacgcctgggttaccgattgatttggaaattggatatgttcctccctccactcgtggtcaatatccaggtctctacttgtttggtggtcattctaggatgcttcgtcctgttcgttacttacctttggataaagaagacattgttggaccttttgagcaagtgtacatgaacattgctgtcactcctcaagaaattcaaaataacgttcatacacacgtagaatttacgcccacaaatattctttctattttggctaatttgactccattttctgatttcaaccagtctccaagaaacatgtatcaatgtcagatgggtaaacaaacaatgggtactccgggtgtagctttgtgccatcgttccgacaataagctttataggttgcaaacaggtcaaacgcctatcgtaaaagctaatttatatgatgattatggcatggataactttccaaacgggtttaatgctgttgttgcggtcatcagttatactggttatgatatggatgatgcaatgattataaacaaatctgcagatgaaagaggtttcggttatggtactatgtataagactgagaaagtggatttagcacttaacagaaaccgtggtgacccaattacacagcattttggtttcgggaatgacgaatggccaaaggagtggcttgagaaattagacgaggatggtttgccatacattggcacttatgttgaagagggtgatccaatctgcgcatactttgacgatactttaaataagaccaaaatcaagacatatcactcctctgaaccagcatatatcgaagaggtaaatttaatcggtgatgaatccaataagttccaagaattacaaactgttagcataaaatatcgtattagaagaacgcctcaaattggtgataaattttcttctagacacggtcaaaaaggtgtttgttccagaaaatggccaaccattgatatgccttttagcgaaacaggtatccaaccagacatcatcattaaccctcatgctttcccttctcgtatgaccattggtatgttcgtcgaatctttagcaggtaaagcgggggcattgcatggtattgcacaggactctacaccttggatctttaacgaggacgataccccagccgattactttggtgagcaattggcgaaggcgggttacaactaccatggtaatgagccaatgtactctggtgctactggtgaagaattaagggcagatatttatgttggtgttgtctactaccaaagattacgtcatatggtcaatgacaagttccaagttcgttccactggtcctgtgaatagtttgactatgcagcctgtcaaaggtagaaagagacatggtggtattcgtgtcggtgaaatggaaagagatgctttgattgggcatggtacatcttttttattacaagatcgtttgttgaattcttctgactacacacaggcatccgtatgtcgcgagtgtggttctattttgaccacgcaacagagtgtgccaagaattggttccatttccaccgtttgttgccgtcgttgttccatgagattcgaagatgcaaagaagttgttgactaaaagtgaagatggagagaaaatttttattgacgactctcaaatttgggaagatggacaaggtaacaaatttgttggtggtaatgaaacaactacggtggccataccatttgtgttgaagtacttggactctgagctttccgcaatgggtataagattgcgttataatgtagagcccaaatga

SEQ ID NO: 11451 - DNA, 219 bp, Saccharomyces cerevisiae
atgagaccagcacagttactgttgaatacagctaaaaaaacatctggtggctacaaaatacccgtcgaattaacaccgttatttctcgctgttggtgtagctttatgctctgggacatacttcacatataagaaattaagaactgacgagactttgagattgacaggtaacccagaattatctagtttagatgaagtccttgccaaagataaggattaa

SEQ ID NO: 11452 - DNA, 219 bp, Artificial Sequence
  Description of Artificial Sequence: Synthetic polynucleotide
atgagaccagcacagttattattgaatacagctaaaaaaacatctggtggctacaaaatacccgtcgaattaacaccgttatttctcgctgttggtgtagctttatgctctgggacatacttcacatataagaaattaagaactgacgagactttgagattgacaggtaacccagaattatctagtttagatgaagtccttgccaaagataaggattga

SEQ ID NO: 11453 - DNA, 981 bp, Saccharomyces cerevisiae
atggcagaagtactgaccgtcctcgagcagccgaactcaattaaagattttctcaagcaggattcaaatattgcgtttctagctggtggagtagctggcgcggtttcccgaaccgttgtttcaccttttgagagagttaaaatactgctgcaagttcaaagttcaaccacttcttataaccgaggtatctttagctctatacggcaggtttaccatgaggagggaaccaaaggtttattcagaggaaatggtttgaactgcataagaatttttccctatagtgcagtccagtttgtagtatacgaagcttgtaagaaaaagttattccatgtaaatggcaataatggacaagaacaactaacgaacacccaaagactattcagtggtgcattgtgtggtggttgtagtgtggtggctacttacccgttggacttgatcaaaacaagactatcgattcagacagcaaatttgagcagtttaaaccgctcaaaggcaaaaagtatatcaaagcctccggggatctggcaattactaagcgaaacttacagactcgaaggcggtctcaggggattatataggggtgtatggccaacgagtcttggtgttgttccatatgtagcactaaactttgcagtttacgaacaattgagagaattcggtgtcaattcctccgatgctcagccttcctggaaaagtaacctctataaattaacaattggcgccataagtggaggggttgcgcaaacaatcacttatccctttgatctgctaagaagaagatttcaagttctcgcaatgggcggaaatgaactgggatttagatacacgagtgtctgggatgcgctcgtgacaatcggcagagcagaaggcgttagcggttactacaaaggcttagctgcaaacctttttaaagttgttccttcaactgcagtgagttggctagtttacgaagttgtatgtgattctgtaagaaattggtga

SEQ ID NO: 11454 - DNA, 981 bp, Artificial Sequence
  Description of Artificial Sequence: Synthetic polynucleotide
atggcagaagtattaaccgtcctcgagcagccgaactctattaaagattttctcaagcaggattctaatattgcgtttttggctggtggagtagctggcgcggtttccagaaccgttgtttctccttttgagagagttaaaatattattacaagttcaaagttctaccacttcttataacagaggtatctttagctctataagacaggtttaccatgaggagggaaccaaaggtttattcagaggaaatggtttgaactgcataagaatttttccctatagtgcagtccagtttgtagtatacgaagcttgtaagaaaaagttattccatgtaaatggcaataatggacaagaacaattaacgaacacccaaagattattcagtggtgcattgtgtggtggttgtagtgtggtggctacttacccgttggacttgatcaaaacaagattatccattcagacagcaaatttgagcagtttaaaccgctctaaggcaaaaagtatatccaagcctccggggatctggcaattattaagcgaaacttacagactcgaaggcggtctcaggggattatataggggtgtatggccaacgagtcttggtgttgttccatatgtagcattgaactttgcagtttacgaacaattgagagaattcggtgtcaattcctccgatgctcagccttcctggaaaagtaacctctataaattaacaattggcgccataagtggaggggttgcgcaaacaatcacttatccctttgatttattaagaagaagatttcaagttctcgcaatgggcggaaatgaattaggatttagatacacgagtgtctgggatgcgctcgtgacaatcggcagagcagaaggcgttagcggttactacaaaggcttagctgcaaacctttttaaagttgttccttccactgcagtgagttggttagtttacgaagttgtatgtgattctgtaagaaattggtga

SEQ ID NO: 11455 - DNA, 954 bp, Saccharomyces cerevisiae
atgaatttttccctttcaaagcaaagttcagaaaaacaatcatcatatacagacaagtcaagatctcctaatataggaatgtgtacagtcaattataaatcgaacctcccccttcaagtgtccgcagttgatcagctgagcactggtaaggggactcaattttatggccacaatagctacaaaaatgaacgggaatgttataatagtacgaaaataaacttaccaccaatttcatcccttttgcctaattttgaaaataatacaccacctaacgtagattcaagggttcaattccctccacagcaagtttatcaaagcatgaatgttgtacccattgttaatgagatctacaccccaatttccatgaacgcaacatctgatcaatatcctatctactatacggaaagtcagcaaccaataccacatagccagtctcctcatttgacctcctctgctcccttgatgatgccagtcatggtcccaacagtatataaaccattgacaccatacgacaaagaaccaataacaattgcctccgaacctaacttcactgcaatatcaatggcgagtcacccaaacgctgccttagagctatgccacgataggccaaaatcagtcccacctgggtatggcgtacttccaaccatgcaggaagccagtaacggcagaacaaaaagcgaacctggtgccgtgttgaacggttcagcaacattttctgattggaaaactgacacccgaatatcatccacaaagctgagaaagcagtgcccagtatgtggaaaaatttgttcgaggccctcaacgctgaagacacattacttaattcatacgggagatactcctttcaaatgtacttgggagggttgcacaaaatccttcaatgtgaaaagcaatatgctgagacatttgaaaagccatgaaaggaaaagaaacaaagtcttaaacactacatag

SEQ ID NO: 11456 - DNA, 954 bp, Artificial Sequence
  Description of Artificial Sequence: Synthetic polynucleotide
atgaatttttccctttccaagcaaagttctgaaaaacaatcttcttatacagacaagtctagatctcctaatataggaatgtgtacagtcaattataaaagtaacctcccccttcaagtgtccgcagttgatcagttgagcactggtaaggggactcaattttatggccacaatagctacaaaaatgaaagagaatgttataatagtacgaaaataaacttaccaccaatttcttcccttttgcctaattttgaaaataatacaccacctaacgtagatagtagggttcaattccctccacagcaagtttatcaaagcatgaatgttgtacccattgttaatgagatctacaccccaatttccatgaacgcaacatctgatcaatatcctatctactatacggaaagtcagcaaccaataccacatagccagtctcctcatttgacctcctctgctcccttgatgatgccagtcatggtcccaacagtatataaaccattgacaccatacgacaaagaaccaataacaattgcctccgaacctaacttcactgcaatatccatggcgagtcacccaaacgctgccttagagctctgccacgataggccaaaatctgtcccacctgggtatggcgtacttccaaccatgcaggaagccagtaacggcagaacaaaaagcgaacctggtgccgtgttgaacggttctgcaacattttctgattggaaaactgacaccagaatatcttccacaaagttgagaaagcagtgcccagtatgtggaaaaatttgttctaggcccagtacgttgaagacacattacttaattcatacgggagatactcctttcaaatgtacttgggagggttgcacaaaatccttcaatgtgaaaagcaatatgttgagacatttgaaaagccatgaaaggaaaagaaacaaagtcttaaacactacatga

SEQ ID NO: 11457 - DNA, 330 bp, Saccharomyces cerevisiae
atgtcttgcattttttccgctgacttgggagtagagtacagctgcgcggagtcgcgtattacaaatcttgtactttgcattctgtgcatacgtgaggaaaaagcagcacctgttgtgaaaaaagataaatttctttttttcatttttctatcctcaaaggaaaatcttttctgcgaaatttctagccgctcttcagtttccgaagtaaagtcgctgagggcgaaaaacaactttatttgcccacacgctgttataggcttccagggagcaaaagcgcaattgggaataaggtttcctcaattgaatggtttgcttcgcctacagcattaa

SEQ ID NO: 11458 - DNA, 330 bp, Artificial Sequence
  Description of Artificial Sequence: Synthetic polynucleotide
atgtcttgcattttttccgctgacttgggagtagagtacagctgcgcggagtctcgtattacaaatcttgtactttgcattttgtgcatacgtgaggaaaaagcagcacctgttgtgaaaaaagataaatttctttttttcatttttctttcctccaaggaaaatcttttctgcgaaatttctagccgctcttctgtttccgaagtaaagtctttgagggcgaaaaacaactttatttgcccacacgctgttataggcttccagggagcaaaagcgcaattgggaataaggtttcctcaattgaatggtttgcttcgcttgcagcattga

SEQ ID NO: 11459 - DNA, 744 bp, Saccharomyces cerevisiae
atgtggagaacaaaaacgctagaatctatgctttgtagcccaatgaaatgttcatcgtctaacatagggggatcctatgcgcaatcttcaaaggaagtctcgaacacgaccaaaagggaagtgcatcttccaccttgttcgtcgattatgcacgctccacttactcctgaaataaaccaggccgcactaccacctcccgcttaccattacgcaccttcttctctgcatcagacagaggatcccgtatggagatcaagtcccaactctattatcttttcgccggttatagcaacaccgcaacctttccctttaacgttcgttgaacgtcaatcttgttgccctatttattcaacggcagcttcctcttatactgcccaatctgtacctccatcaatgcagcattttcaggaggaaaaccacagagcggtgagcaacgagcagtactccctcccgaatgtgcatatagggcaaaatcctgggacgctattatcccaaacacaaaccgacttagatcttatacaaaagcaactgcgcgctgtggtaaagctacggaaacaatgtcctatctgtgggaaggtttgttcgagaccttcaacactgaggactcattacttaatacatacgggagacacacctttcaaatgtacttgggagcattgcaacaaatctttcaatgtcaagagtaacatgttaaggcatttaagaacccatcaaaagaaaatagcaaagaaaaaacatcagtga

SEQ ID NO: 11460 - DNA, 744 bp, Artificial Sequence
  Description of Artificial Sequence: Synthetic polynucleotide
atgtggagaacaaaaacgttagaatctatgctttgtagcccaatgaaatgttcttcttctaacatagggggatcctatgcgcaatcttccaaggaagtctccaacacgaccaaaagggaagtgcatcttccaccttgttcttccattatgcacgctccacttactcctgaaataaaccaggccgcattgccacctcccgcttaccattacgcaccttcttctttgcatcagacagaggatcccgtatggagaagtagtcccaactctattatcttttctccggttatagcaacaccgcaacctttccctttaacgttcgttgaacgtcaatcttgttgccctatttattctacggcagcttcctcttatactgcccaatctgtacctccaagcatgcagcattttcaggaggaaaaccacagagcggtgagcaacgagcagtactccctcccgaatgtgcatatagggcaaaatcctgggacgttattatcccaaacacaaaccgacttagatcttatacaaaagcaattgcgcgctgtggtaaagttgagaaaacaatgtcctatctgtgggaaggtttgttccagaccttctacattaaggactcattacttaatacatacgggagacacacctttcaaatgtacttgggagcattgcaacaaatctttcaatgtcaagagtaacatgttaaggcatttaagaacccatcaaaagaaaatagcaaagaaaaaacatcagtga

SEQ ID NO: 11461 - DNA, 738 bp, Saccharomyces cerevisiae
atggctaccaggactcaatttgaaaactccaatgaaatcggtgtattctccaaattaacgaatacttactgtttggttgctgttggtggttctgaaaacttttactctgcatttgaagctgaattaggagatgctattcccatcgttcataccactattgctggtacgcgtatcatcggtagaatgaccgcgggtaaccgtagaggtctgctagttccaacccaaactactgatcaagaattacaacatttaagaaatagtttgccggattccgttaagattcaaagggtagaggaaagactatctgccttgggtaacgtcatctgttgtaatgattacgttgctttagtgcatccagatatcgacagagaaactgaagaattgataagtgatgtactaggcgttgaggtcttccgtcaaaccatatcaggtaatatcttagttgggtcatattgttctttaagtaatcaaggtgggttagtgcatccacaaacaagtgtccaagatcaagaagaattgtcctccttattacaagttcctttggtggctggtaccgttaaccgtggtagttcagttgtcggtgccggtatggttgtgaacgattacttggcagttacaggtctggatactacagccccagaattgagtgttattgaaagtattttccgcttgcaagatgcccaaccagaatccatttcaggtaacctacgtgatactttgattgaaacctactcatag

SEQ ID NO: 11462 - DNA, 738 bp, Artificial Sequence
  Description of Artificial Sequence: Synthetic polynucleotide
atggctaccaggactcaatttgaaaactccaatgaaatcggtgtattctccaaattaacgaatacttactgtttggttgctgttggtggttctgaaaacttttactctgcatttgaagctgaattaggagatgctattcccatcgttcataccactattgctggtacgcgtatcatcggtagaatgaccgcgggtaaccgtagaggtttattggttccaacccaaactactgatcaagaattacaacatttaagaaatagtttgccggattccgttaagattcaaagggtagaggaaagattatctgccttgggtaacgtcatctgttgtaatgattacgttgctttagtgcatccagatatcgacagagaaactgaagaattgataagtgatgtattaggcgttgaggtcttccgtcaaaccatatctggtaatatcttagttgggtcttattgttctttaagtaatcaaggtgggttagtgcatccacaaacaagtgtccaagatcaagaagaattgtcctccttattacaagttcctttggtggctggtaccgttaaccgtggtagttctgttgtcggtgccggtatggttgtgaacgattacttggcagttacaggtttggatactacagccccagaattgagtgttattgaaagtattttccgcttgcaagatgcccaaccagaatccatttctggtaacttgcgtgatactttgattgaaacctactcctga

SEQ ID NO: 11463 - DNA, 432 bp, Saccharomyces cerevisiae
atgagcaaggctacgtgttcctttgagggctgtcatagtgcagttattaccatcaacgatgataacataataaacttaccagagcaggtgcacagcgaattcaagttgctggaaaacagaactatgcgagatgctacccccagcgagagcaacttcttggtcgtccctgatgtttgggactttgataatgttggtgtatctagagaaattccttcttctatattaggggatttgagtgataagagtgattttgtctttgagtatggtaattccagctggaagattaaaaagtgcttgaaatatttgatatgcgctgattgtgataaaggtcctattggaataatatgtaaggtgcaagatcagacaaagaatgaagaaagagttttgcatctactaagcttgcgaagccttcaaattatgggaaggaattag

SEQ ID NO: 11464 - DNA, 432 bp, Artificial Sequence
  Description of Artificial Sequence: Synthetic polynucleotide
atgagcaaggctacgtgttcctttgagggctgtcatagtgcagttattaccatcaacgatgataacataataaacttaccagagcaggtgcacagcgaattcaagttgttggaaaacagaactatgagagatgctacccccagcgagagcaacttcttggtcgtccctgatgtttgggactttgataatgttggtgtatctagagaaattccttcttctatattaggggatttgagtgataagagtgattttgtctttgagtatggtaattccagctggaagattaaaaagtgcttgaaatatttgatatgcgctgattgtgataaaggtcctattggaataatatgtaaggtgcaagatcagacaaagaatgaagaaagagttttgcatttattaagcttgaggagccttcaaattatgggaaggaattga

SEQ ID NO: 11465 - DNA, 1821 bp, Saccharomyces cerevisiae
atggagcaacatctcaaatcaattcctctacaggacgacactaagaaaaaaggcatactatcttttttccagaatacaactacggtaaagagtaataagtttctcacgaaagagaaggatgtcatcactctagatgatcctaaagaggatgtcagtggacctatgatagaaactgttaaacaagaaaccatgaaaagcatcaataaagagtgtgcagatgaaatgaaaacgacacctaagaaggccaatgctgaagacaagcttttatgctacaaaaattcacccatacaaagtacaaaatacgatagaaacaccaacaaacaagtacccaatggaaatataatagctatcgagacaaaaagcagaagctcttctccatgctctaagagagaactttcctcatcgaaaaaggaagaagctaaaagagaaaaggaactaaaaaagcagcaacgtgcagaagagaaacacagaaaagagttattacgacaagaagagaaaaagaaaaaagagctaaaggtagaagaggaaagacaaaggcgtgctgagctgaaaaagcaaaaggaagaggaaaagcgtagaaaggaagaagccagattagaagccaaaagaagaaaagaggaggaaagattgaaaaaggaggaggaaatacgtttgaaagaagaagccaaggaaagagcacaatcccgtattggtaacttctttaaaaaactaagcgattctaatacgcctgtggttgaaaagtcggattatgaaaaattttttctacctttctatgctaaagatggagttagagtcagtaataagtggaaactaacaaaagtggagctggaaggtagcaaaagaaaaatagatgatgaattactgaacagtaaagataaaacaagtagtgacgacttattgaattggttacagtctagaagattacctagaggacataaaattaaacgtaaagctgttgacgttctacagcaaatgcctttgaaggagaaaacagacgatgagctccaatctttacttgcacaagttccgcacaaatatataaaattctacgaaaatgttagacctccgtttatcggaacctattctatggactttactttgccaccaaacgatcccttttctacgaaaggtactggattcaattatgattacgattctgacgttgaatgggttaatgaagaagaagaaggcgaagtcgataacttagaaagtggtgaagaggaggaggaggaggaagatgatgaagacgtacctagcgaaggagagtttgacgggtttctagacagcgaagaaaacagtgatttggatggcctaccctgcgccaagagaaaatttgtaggcccattgataccaacaatatgcctaaaatccaattttgaaaacttatcagaggaaaataaacgatacttacaacaactcaaggccgaagttatcatagaaaccgacgggccaatcgatccattcaaagaacccaaaacatcgtctctaccatccaaaagaagtaattccgacttacaggcacagaccgctagccaatctcaaagtcccgaaaagaaacaaaaagcaatgattacagaccccatggacttacttcgactttttgatggggttcaagacagcacgttttctttgggtactgtgactgaaatagcacagaaaaatttgccgcaatacaacaaacaaacaattaaaaacaccataaaggaatatgccataagaagttctggaaagggtgatttgccccgcaaatgggtaatcaaagacgcacaaaactgggagaatcttcgagccaatgcaaatatgccaaccccgtctttgtaa

SEQ ID NO: 11466 - DNA, 1821 bp, Artificial Sequence
  Description of Artificial Sequence: Synthetic polynucleotide
atggagcaacatctcaaatccattcctttgcaggacgacactaagaaaaaaggcatattatcttttttccagaatacaactacggtaaagagtaataagtttctcacgaaagagaaggatgtcatcactttagatgatcctaaagaggatgtcagtggacctatgatagaaactgttaaacaagaaaccatgaaaagcatcaataaagagtgtgcagatgaaatgaaaacgacacctaagaaggccaatgctgaagacaagcttttatgctacaaaaattctcccatacaaagtacaaaatacgatagaaacaccaacaaacaagtacccaatggaaatataatagctatcgagacaaaaagcagaagctcttctccatgctctaagagagaactttcctcttctaaaaaggaagaagctaaaagagaaaaggaattgaaaaagcagcaacgtgcagaagagaaacacagaaaagagttattaagacaagaagagaaaaagaaaaaagagttgaaggtagaagaggaaagacaaaggcgtgctgagttgaaaaagcaaaaggaagaggaaaagcgtagaaaggaagaagccagattagaagccaaaagaagaaaagaggaggaaagattgaaaaaggaggaggaaatacgtttgaaagaagaagccaaggaaagagcacaatcccgtattggtaacttctttaaaaaattaagcgattctaatacgcctgtggttgaaaagagtgattatgaaaaattttttttacctttctatgctaaagatggagttagagtcagtaataagtggaaattaacaaaagtggagttagaaggtagcaaaagaaaaatagatgatgaattattaaacagtaaagataaaacaagtagtgacgacttattgaattggttacagtctagaagattacctagaggacataaaattaaacgtaaagctgttgacgttttacagcaaatgcctttgaaggagaaaacagacgatgagctccaatctttacttgcacaagttccgcacaaatatataaaattctacgaaaatgttagacctccgtttatcggaacctattctatggactttactttgccaccaaacgatcccttttctacgaaaggtactggattcaattatgattacgattctgacgttgaatgggttaatgaagaagaagaaggcgaagtcgataacttagaaagtggtgaagaggaggaggaggaggaagatgatgaagacgtacctagcgaaggagagtttgacgggtttttggacagcgaagaaaacagtgatttggatggcttgccctgcgccaagagaaaatttgtaggcccattgataccaacaatatgcttgaaatccaattttgaaaacttatctgaggaaaataaaagatacttacaacaactcaaggccgaagttatcatagaaaccgacgggccaatcgatccattcaaagaacccaaaacatcttctttaccatccaaaagaagtaattccgacttacaggcacagaccgctagccaatctcaaagtcccgaaaagaaacaaaaagcaatgattacagaccccatggacttacttagactttttgatggggttcaagacagcacgttttctttgggtactgtgactgaaatagcacagaaaaatttgccgcaatacaacaaacaaacaattaaaaacaccataaaggaatatgccataagaagttctggaaagggtgatttgccccgcaaatgggtaatcaaagacgcacaaaactgggagaatcttcgtgccaatgcaaatatgccaaccccgtctttgtga

SEQ ID NO: 11467 - DNA, 2802 bp, Saccharomyces cerevisiae
atgtctcaacagtctagctctccaacaaaagaggataataactccagctcccccgttgtgcctaatcctgattctgttccaccacagctttcttccccagctctattttatagctcctcttcatcacaaggtgatatctatggtcgcaacaatagccagaacttaagtcagggagagggaaacatcagagctgctataggttcttctccactaaattttccatcttcttcccaaagacaaaattccgatgttttccaatctcaaggcagacagggcagaattcgttcttctgcgagcgcttctggaaggtctagatatcattctgatctgagaagtgatagagcactgcctacttcttcctcttctttaggccgtaatggtcaaaaccgtgtacacatgcgaagaaatgatattcatacatctgatttatcctctccaagaagaattgtggattttgatactagatccggcgtgaatactttggatacttcttcttcttctgctcctccatcggaagccagtgaacccttgagaataatttggggtaccaacgtcagtatccaggaatgtacaactaattttcgtaattttttgatgtctttcaagtataaattccgtaaaatattggatgaaagggaggaattcattaacaatactaccgacgaagaactatactatatcaagcagcttaatgaaatgagagaacttggtacctctaatttaaacttggatgctagaaacttacttgcttacaagcaaacagaagacttataccatcaactattaaattatcctcaagaagtgatttctatcatggatcaaactatcaaggactgtatggtttccttaatagtagacaacaatttggattacgatttagatgaaatagagaccaagttttataaagtaaggccttacaatgtaggttcttgtaaaggtatgcgcgaattgaatccaaatgatattgataaattgataaacttaaagggtcttgtcctgagatcaactccggttatccctgatatgaaggtagcgtttttcaaatgcaacgtctgcgatcatacaatggcagtggaaattgatagaggagttatacaagagcccgctaggtgtgaacgtattgattgtaatgaacccaattccatgtcactgattcacaacaggtgttcattcgcagataaacaagtcattaagttacaggaaactccagactttgtgcctgatggacaaacgcctcactctatctcattatgtgtttacgatgaattagtggattcttgcagggcgggcgatcgtattgaggtgactggcacgttcaggtccatccccattagagctaattccaggcaacgcgtactaaagtcgttgtataaaacatacgtcgatgtggtccacgttaaaaaagtttcagataagaggttagacgtcgatacttctactattgaacaagaattaatgcagaacaaggtagatcataacgaggtcgaagaagtaagacaaattactgatcaggatttagcaaaaattcgcgaggttgcggcaagagaagatttatacagtttattagcccgctctattgccccaagtatttacgagctagaagatgtcaagaagggtatattacttcagctatttggcggcacgaataaaacctttaccaagggtggccgttatagaggtgacataaatattttactttgtggggatccttctacttccaaatcgcaaattttgcaatacgttcacaaaattactcctcgtggtgtgtatacttcgggtaaaggttcatctgccgttggtttaactgcttatattacaagggatgtcgacacaaaacaacttgttttggaaagtggtgcattagtattgtctgatggaggtgtttgttgtattgacgagtttgataaaatgagtgattctacaaggtccgtcttgcacgaagtcatggaacagcagactatttcaatcgcaaaagcgggaattatcacaacacttaatgccagaagttctattttggccagtgctaacccaattggttcacgctacaaccccaatttgcctgtgactgaaaatattgatctaccgcccccactactttcgagattcgatctggtctatcttgtccttgataaggttgatgagaaaaatgacagagaactagccaaacacttaacaaatctttacctggaagataagcccgaacatatttctcaagacgacgtgctaccagttgaatttttaacgatgtatattagttatgcaaaggagcacatacacccaataatcaccgaggccgctaagactgagcttgttcgtgcttatgtaggaatgagaaagatgggtgacgattcgagatccgatgagaagagaatcacagctaccacaagacaacttgaaagtatgattcgtttggctgaggcgcacgccaaaatgaaattgaaaaacgtcgtagagctggaggatgttcaagaagccgttagattaattagatcagccataaaagattatgcaacagaccctaaaaccggtaaaatcgacatgaatttagttcaaacaggtaaatcagttattcagagaaaactacaggaggatttgtcaagggaaattatgaatgttttgaaggatcaggcatcagactcaatgtcattcaatgagcttataaaacaaatcaatgaacactctcaagatagagttgagtcttctgatatccaggaagccttgtcaagattgcaacaagaggacaaggtcattgtccttggcgagggtgtaaggagatcagttcgcctgaataaccgtgtctga

SEQ ID NO: 11468 - DNA, 2802 bp, Artificial Sequence
  Description of Artificial Sequence: Synthetic polynucleotide
atgtctcaacagtctagctctccaacaaaagaggataataactccagctcccccgttgtgcctaatcctgattctgttccaccacagctttcttccccagctttgttttatagctcctcttcttctcaaggtgatatctatggtcgcaacaatagccagaacttaagtcagggagagggaaacatcagagctgctataggttcttctccattgaattttccatcttcttcccaaagacaaaattccgatgttttccaatctcaaggcagacagggcagaattcgttcttctgcgagcgcttctggaaggtctagatatcattctgatttgagaagtgatagagcattacctacttcttcctcttctttaggccgtaatggtcaaaaccgtgtacacatgagaagaaatgatattcatacatctgatttatcctctccaagaagaattgtggattttgatactagatccggcgtgaatactttggatacttcttcttcttctgctcctccatctgaagccagtgaacccttgagaataatttggggtaccaacgtcagtatccaggaatgtacaactaattttcgtaattttttgatgtctttcaagtataaattccgtaaaatattggatgaaagggaggaattcattaacaatactaccgacgaagaattatactatatcaagcagcttaatgaaatgagagaacttggtacctctaatttaaacttggatgctagaaacttacttgcttacaagcaaacagaagacttataccatcaattattaaattatcctcaagaagtgatttctatcatggatcaaactatcaaggactgtatggtttccttaatagtagacaacaatttggattacgatttagatgaaatagagaccaagttttataaagtaaggccttacaatgtaggttcttgtaaaggtatgcgcgaattgaatccaaatgatattgataaattgataaacttaaagggtcttgtcttgagatctactccggttatccctgatatgaaggtagcgtttttcaaatgcaacgtctgcgatcatacaatggcagtggaaattgatagaggagttatacaagagcccgctaggtgtgaacgtattgattgtaatgaacccaattccatgtctttgattcacaacaggtgttctttcgcagataaacaagtcattaagttacaggaaactccagactttgtgcctgatggacaaacgcctcactctatctctttatgtgtttacgatgaattagtggattcttgcagggcgggcgatcgtattgaggtgactggcacgttcaggtccatccccattagagctaattccaggcaacgcgtattgaagtctttgtataaaacatacgtcgatgtggtccacgttaaaaaagtttctgataagaggttagacgtcgatacttctactattgaacaagaattaatgcagaacaaggtagatcataacgaggtcgaagaagtaagacaaattactgatcaggatttagcaaaaattcgcgaggttgcggcaagagaagatttatacagtttattagcccgctctattgccccaagtatttacgagttagaagatgtcaagaagggtatattacttcagttatttggcggcacgaataaaacctttaccaagggtggccgttatagaggtgacataaatattttactttgtggggatccttctacttccaaatctcaaattttgcaatacgttcacaaaattactcctcgtggtgtgtatacttctggtaaaggttcttctgccgttggtttaactgcttatattacaagggatgtcgacacaaaacaacttgttttggaaagtggtgcattagtattgtctgatggaggtgtttgttgtattgacgagtttgataaaatgagtgattctacaaggtccgtcttgcacgaagtcatggaacagcagactatttccatcgcaaaagcgggaattatcacaacacttaatgccagaagttctattttggccagtgctaacccaattggtagtcgctacaaccccaatttgcctgtgactgaaaatattgatttaccgcccccattactttctagattcgatttggtctatcttgtccttgataaggttgatgagaaaaatgacagagaattggccaaacacttaacaaatctttacttggaagataagcccgaacatatttctcaagacgacgtgttaccagttgaatttttaacgatgtatattagttatgcaaaggagcacatacacccaataatcaccgaggccgctaagactgagcttgttcgtgcttatgtaggaatgagaaagatgggtgacgattccagatccgatgagaagagaatcacagctaccacaagacaacttgaaagtatgattcgtttggctgaggcgcacgccaaaatgaaattgaaaaacgtcgtagagttagaggatgttcaagaagccgttagattaattagatctgccataaaagattatgcaacagaccctaaaaccggtaaaatcgacatgaatttagttcaaacaggtaaatctgttattcagagaaaattacaggaggatttgagtagggaaattatgaatgttttgaaggatcaggcaagtgactccatgagtttcaatgagcttataaaacaaatcaatgaacactctcaagatagagttgagtcttctgatatccaggaagccttgtccagattgcaacaagaggacaaggtcattgtccttggcgagggtgtaaggagatctgttcgcttgaataaccgtgtctga

SEQ ID NO: 11469 - DNA, 348 bp, Saccharomyces cerevisiae
atgctaagcaggatccaaaattataccagtgggttggtttctaaagcaaatcttttgtcatcaaaggctttatactatggtaaagtcggtgccgagatttcaaaacagatttatttaaaagagggtcttcaaccaccaactgttgcccagttcaaatcagtgtattcgaacctttataagcagagcctaaactttgctctaaagcctacagaagttttatcgtgtttaaaaaacatccaaaagaatgaactattaaaatatggcgcatatggtattcagttgatagggttttattctgtcggtgaaataattggaagaagaaaattagtgggatataaacatcactaa

SEQ ID NO: 11470 - DNA, 348 bp, Artificial Sequence
  Description of Artificial Sequence: Synthetic polynucleotide
atgttaagcaggatccaaaattataccagtgggttggtttctaaagcaaatcttttgagttccaaggctttatactatggtaaagtcggtgccgagatttccaaacagatttatttaaaagagggtcttcaaccaccaactgttgcccagttcaaatctgtgtattccaacctttataagcagagcttgaactttgctttgaagcctacagaagttttaagttgtttaaaaaacatccaaaagaatgaattattaaaatatggcgcatatggtattcagttgatagggttttattctgtcggtgaaataattggaagaagaaaattagtgggatataaacatcactga

SEQ ID NO: 11471 - DNA, 2709 bp, Saccharomyces cerevisiae
atggagcaaatcaattcgaacagtagaaaaaagaagcaacaattggaagtattcaaatattttgcaagtgtccttacaaaagaggacaagcctattagtatcagtaatggtatgttagatatgccgacagtgaactccagtaaactcacagcaggaaatgggaaacctgacacggagaagcttacaggagaactaattttaacatacgacgatttcattgaactgatatctagctcaaagactatttattcgaagtttacggaccattcgttcaatttgaaccagatacccaagaacgttttcgggtgtattttcttcgctattgatgaacaaaacaagggatatctgacgcttaatgattggttttattttaataatttattagaatatgataattatcatctcattattctatatgagttctttaggaaatttgatgtagagaatttgaaggcaaaacaaaaaaaagagcttggtagttcgtcgtttaatttaaaggctgcagatgatcgaattaagtcaattaattatggtaacagatttctaagctttgatgatcttcttttgaatctgaaccaattcaaagatactatccgcctgttgcacgaatctattgatgataattttgttaaagataacaaattactacttgattggaatgactttcgatttctgaaattttacaaatgttatcatgaaaatgaagagtatttgagtttaaactctctggtcacgattttacaaaatgatcttaagaatgaaaaaatatttataggttttgataggttggcacagatggactcacaagggcatcgtttagccctaagcaaaaatcaactcacctatcttctaaggttattttactctcacagggtgtctgcagatatattttcctccttgaatctatcaaacaccgaattactaaaagcggacaataattccattccgtacaatgtattcaaggatatattttatttatttcaaaattttgacctactgaaccaaatatttcacaagtatgttactgaaaataatttgaatgagcaggatattagggaacaaatagttactaaaaatgactttatgacagttttaaacgcccagtataacaaagtaaacaatatcattgagttctctccttcccaaatcaacctactattttctatcgtcgcaaattcaaaggaaaacagaagattaagaaagagaaatcaagatcgagatgacgagctattaaatgatcaccattatgattcagatattgatttttttatccataatgagtatttgcatggagtaagcagatccagaaaaaatttagaaagttttaatgactattatcatgatctctcggatggatttgaccaagactctggtgttaaaaaagcttcaaaagcgagtactggcttgtttgaatctgtatttggaggtaaaaaagataaagcaacgatgcgttctgacttaacaattgaagatttcatgaaaattttgaacccaaattacctgaacgacttagttcaccaaatggaattgcaaaaaaatcaaaatgagtcattgtatattaattactacttttatccaattttcgattcgttgtacaatttctccttgggttctattgcgggttgtattggtgcaactgtagtatacccaatagactttataaaaacaaggatgcaagcccaaagatctttagcccaatacaaaaactcaattgattgtttgttgaagattatatcccgcgaaggaataaaaggtctctactctggcttagggccacaattaataggagttgctcctgaaaaggcgataaaattgactgtcaatgattttatgagaaacaggttgactgataaaaacggcaagctaagcctttttcctgaaattatttctggcgcttcagctggtgcatgtcaagttatatttactaatccgttagagattgtaaaaattaggctacaggtccaatccgactatgttggtgaaaacatacaacaagccaatgaaactgccactcaaatagtcaaaaaattaggactgaggggcttgtacaatggtgtagccgcatgtttaatgagagatgttccattctctgctatttattttcccacttatgcacatttaaaaaaagatctctttgattttgatccaaatgataaaacaaagaggaatcgattaaaaacatgggagcttttaactgccggtgccattgctggtatgccagctgccttcttgactactccttttgatgttataaaaacaaggctccagatagatcctcgaaaaggtgagacaaagtataacggtatatttcatgctatccgaactatcttaaaggaagagagctttagaagctttttcaaaggtggtggagcccgtgtcctaagaagttctccccaatttgggttcactctggccgcctatgaattattcaagggctttattccctcccccgataacaaattaaaaagcagagagggtaggaagagattttgtatcgatgacgacgcaggcaatgaagagacagtagttcatagtaacggtgaactcccacagcaaaagttttactctgatgatagaaaacatgccaattattactataaaagctgtcaaattgcgaaaacattcattgatttggacaataacttttctaggtttgactcttcagtttataaaaactttcaagagcacctaagaagcattaacgggtga

SEQ ID NO: 11472 - DNA, 2709 bp, Artificial Sequence
  Description of Artificial Sequence: Synthetic polynucleotide
atggagcaaatcaatagcaacagtagaaaaaagaagcaacaattggaagtattcaaatattttgcaagtgtccttacaaaagaggacaagcctattagtatcagtaatggtatgttagatatgccgacagtgaactccagtaaactcacagcaggaaatgggaaacctgacacggagaagcttacaggagaattgattttaacatacgacgatttcattgaattgatatctagctctaagactatttattccaagtttacggaccattctttcaatttgaaccagatacccaagaacgttttcgggtgtattttcttcgctattgatgaacaaaacaagggatatttgacgcttaatgattggttttattttaataatttattagaatatgataattatcatctcattattctttatgagttctttaggaaatttgatgtagagaatttgaaggcaaaacaaaaaaaagagcttggtagttcttcttttaatttaaaggctgcagatgatagaattaagtctattaattatggtaacagatttttgagctttgatgatcttcttttgaatttgaaccaattcaaagatactatccgcttgttgcacgaatctattgatgataattttgttaaagataacaaattattacttgattggaatgactttagatttttgaaattttacaaatgttatcatgaaaatgaagagtatttgagtttaaactctttggtcacgattttacaaaatgatcttaagaatgaaaaaatatttataggttttgataggttggcacagatggactctcaagggcatcgtttagccttgagcaaaaatcaactcacctatcttttgaggttattttactctcacagggtgtctgcagatatattttcctccttgaatttatctaacaccgaattattgaaagcggacaataattccattccgtacaatgtattcaaggatatattttatttatttcaaaattttgacttattaaaccaaatatttcacaagtatgttactgaaaataatttgaatgagcaggatattagggaacaaatagttactaaaaatgactttatgacagttttaaacgcccagtataacaaagtaaacaatatcattgagttctctccttcccaaatcaacttacttttttctatcgtcgcaaattctaaggaaaacagaagattaagaaagagaaatcaagatagagatgacgagttattaaatgatcaccattatgattctgatattgatttttttatccataatgagtatttgcatggagtaagcagatccagaaaaaatttagaaagttttaatgactattatcatgatctctctgatggatttgaccaagactctggtgttaaaaaagcttccaaagcgagtactggcttgtttgaatctgtatttggaggtaaaaaagataaagcaacgatgcgttctgacttaacaattgaagatttcatgaaaattttgaacccaaattacttgaacgacttagttcaccaaatggaattgcaaaaaaatcaaaatgagtctttgtatattaattactacttttatccaattttcgattctttgtacaatttctccttgggttctattgcgggttgtattggtgcaactgtagtatacccaatagactttataaaaacaaggatgcaagcccaaagatctttagcccaatacaaaaactctattgattgtttgttgaagattatatcccgcgaaggaataaaaggtctctactctggcttagggccacaattaataggagttgctcctgaaaaggcgataaaattgactgtcaatgattttatgagaaacaggttgactgataaaaacggcaagttgagcctttttcctgaaattatttctggcgcttctgctggtgcatgtcaagttatatttactaatccgttagagattgtaaaaattaggttacaggtccaatccgactatgttggtgaaaacatacaacaagccaatgaaactgccactcaaatagtcaaaaaattaggattgaggggcttgtacaatggtgtagccgcatgtttaatgagagatgttccattctctgctatttattttcccacttatgcacatttaaaaaaagatctctttgattttgatccaaatgataaaacaaagaggaatagattaaaaacatgggagcttttaactgccggtgccattgctggtatgccagctgccttcttgactactccttttgatgttataaaaacaaggctccagatagatcctagaaaaggtgagacaaagtataacggtatatttcatgctatcagaactatcttaaaggaagagagctttagaagctttttcaaaggtggtggagcccgtgtcttgagaagttctccccaatttgggttcactttggccgcctatgaattattcaagggctttattccctcccccgataacaaattaaaaagcagagagggtaggaagagattttgtatcgatgacgacgcaggcaatgaagagacagtagttcatagtaacggtgaactcccacagcaaaagttttactctgatgatagaaaacatgccaattattactataaaagctgtcaaattgcgaaaacattcattgatttggacaataacttttctaggtttgactcttctgtttataaaaactttcaagagcacttgagaagcattaacgggtga

SEQ ID NO: 11473 - DNA, 3402 bp, Saccharomyces cerevisiae
atgcacggcaaagagttggctggcaggctccggaaaagggaaaatgataacgatttatcaccaaattcaagctcttctcctgctgaaagatttaggtgtccacatcccgaatgtaataaaactttctcacgtcaggaacatttatcaagacacaagctaaaccactggccgaaagagatatatgtttgttcttacgtgcttcctactacaaatgcgccttgcaataaaacgtttgtaaggaaagatttactgatcagacatgaaaagaggcattcaaaggtgaaaaacagattaagtcggccaagcaaggaccagatttcctcatcaaataaggacttctccaaaaatgcaccatataatcccagtgaagtacccctttctacgcaaagtggaacttctacgattaacttaataaaaaattctgtgaatccaccaccatctatcacacaagaatcaaaatttcgtccttttcttcaacaggctcaacaacctcaacaggttcagcaatcacaacaaccacaacaaattcaacaactgcagcaacttcaattcccgcagcaactgcgggcaccattgcaacaacctatgttgcagcaacaaatgcatccacagcaagcaagtcctacttttccatcgtatgatcctcgaataaggaacaacggtcaaaatggtaatcaattttttaatttgatatttgataaccgtacaggcgttaatggttttgaagtggatgcagcgaataacaacggtaatggcaatgaccaaaatatgaatatcaatccagccgtgcagcagcaacgatatcaagacagaaattttgcaagtagttcatatcagcagccactccagccacttacccaggatcaacaacaggaacagtactttcagcagcaaaagcttgcccaacagcaacagcaacagcaacagcaacaacaacaacaacaacaattaccaccccagaatccatttggagatccattaacatcttcctctagcggtgctaatttgtcagttatgcaggaccttttttctacaaattttttgaacagcgacccattacaatctttcatgcaagaactttctgaagccccgcaagtaagtattgaagatacattttctgacaagaatacaatcccacctaatgaaaaacctgttcaacaagacgaagggttccagaatcctccagttatgtttgagttaccacaagataacattaaaattcccaaagcacaaccgaagttcaacgataaccccagtacttcagtgaaggacaatctttccagtcagaagcttaatatcaacgagctaaaacggagatcatctaaagattcaggagtaggaaacaattcctctctgaactacaaggaacagttgcgtcactctatgaaaagtgtcccgtcatttttccatccggatcccttaacaaagtataagatatcaaaagaaaaatgtcaagaaatgttttcatttgttccagaattacgctatgtctctattgaatctatacacaaatcgttaaaatccttctggttgaacttccatccacaatacggtctgcttcacaaaccctcttttcacgttgataaacagcctgcaattttgaatttggcactaattatgactggcgcaagttttttgggaagcgagtatcgtgaacagattagtgacccaatttgtggtcctctaagatggataattttttctcatgctgattttcaaccaccttctaaaacctacatcattcaaagtttattattagtcgaaggatatgaaaaaacaagtacgaacaggtatttacatgaaaggtcttttttacatcacggaacgaccattcaattgctaaggcgaacgccctctttaggcggccatcccttaatggtcaaaaccggcaaaacctctggggaaaattcaattcaagacccacaagaagtttataaaagatggattgattttgaaatgttgaaaagaatagctttctacgcattttatatggacactacacatgctgtagtgtttggatactggaatttatttattaatagcaatcagattcaactaactttaccctgtccagatcaagtgtgggaatcttatgatttgagctatgaaactctgatggagcatgggtatggcagcacaaagagagatgagaataatacatttttgtctgcgttaatgcaattaatgaaaaatgtcattcaaatcttacgaaataataatatacggagaaacaaagtcaacaatggtggaatagagagtacccctacagacttggaaagcactacagattggaatattcagagtctttttggtaaaaagattcttttggcggggataatttcgatcttatttcaatgtcaagaggaagttaatggtgactatttcattactaactttaggggcggaatcactgatcatttaggcctttcatggaaagatattttatcatttgcaatgaactattggcttcacgaagttcagaaaagctgcactgatccgaaagcatgtaggataagtactccatctgaggagacactaacgaacagaaaaattgacgaggataatggagatggactatgtgatgatgatttggacttgctttcctccgataatccgtcaaattgtaaaattcccgttattcatatctctcaaattgtcctacgtattcttcatcatgattattacatatatgcaggagcaccttggagaatgaatgtaccaattggtcgcgatgaatatgacatgatcagtcgcaggattctccagttcgctaaggacccctacaatgggggtgtagctgtagtctatgccttccagttcttatttgaaatgtttatcattaaggaaaataacgttccaaccgtagtgaagagctacaatataaattctgatcctgtgattactagaccctatgcgattgcattaacttcactcctaatttggtcttgtaattttgcattacatggctgtgaagttagcatatgggataatacagaagcctcaaaggatgaatgctttcaaccagatgacagcaatggtggaaacattctaggcaatactgataataatggatcgacgattgcaaacaacaatttaaaggaaaagaacaattacattccaatagaaagttttgaagtttacctattgagaatgtatcggaacttatatgtggatagctcactcgatgtagttagctttcagaatgacgtttgggcaaaagcgagtttacttcaacatatttctaatacccactttctatgcgggatgatgcagtttatgagagatattttcaacaagagctactgggatttagggcgcgaattcggaaaactcttcgataattgtttggaaaggagcctagggaaaacgtcacccacttgtcataacatgtttgatgtttag

SEQ ID NO: 11474 - DNA, 3402 bp, Artificial Sequence
  Description of Artificial Sequence: Synthetic polynucleotide
atgcacggcaaagagttggctggcaggctcagaaaaagggaaaatgataacgatttatctccaaatagtagctcttctcctgctgaaagatttaggtgtccacatcccgaatgtaataaaactttctctcgtcaggaacatttatctagacacaagttgaaccactggccgaaagagatatatgtttgttcttacgtgcttcctactacaaatgcgccttgcaataaaacgtttgtaaggaaagatttattgatcagacatgaaaagaggcattctaaggtgaaaaacagattaagtaggccaagcaaggaccagatttcctcttccaataaggacttctccaaaaatgcaccatataatcccagtgaagtacccctttctacgcaaagtggaacttctacgattaacttaataaaaaattctgtgaatccaccaccatctatcacacaagaaagtaaatttcgtccttttcttcaacaggctcaacaacctcaacaggttcagcaatctcaacaaccacaacaaattcaacaattgcagcaacttcaattcccgcagcaattaagagcaccattgcaacaacctatgttgcagcaacaaatgcatccacagcaagcaagtcctacttttccatcttatgatcctagaataaggaacaacggtcaaaatggtaatcaattttttaatttgatatttgataaccgtacaggcgttaatggttttgaagtggatgcagcgaataacaacggtaatggcaatgaccaaaatatgaatatcaatccagccgtgcagcagcaaagatatcaagacagaaattttgcaagtagttcttatcagcagccactccagccacttacccaggatcaacaacaggaacagtactttcagcagcaaaagcttgcccaacagcaacagcaacagcaacagcaacaacaacaacaacaacaattaccaccccagaatccatttggagatccattaacatcttcctctagcggtgctaatttgagtgttatgcaggaccttttttctacaaattttttgaacagcgacccattacaatctttcatgcaagaactttctgaagccccgcaagtaagtattgaagatacattttctgacaagaatacaatcccacctaatgaaaaacctgttcaacaagacgaagggttccagaatcctccagttatgtttgagttaccacaagataacattaaaattcccaaagcacaaccgaagttcaacgataaccccagtacttctgtgaaggacaatctttccagtcagaagcttaatatcaacgagttgaaaagaagatcttctaaagattctggagtaggaaacaattcctctttgaactacaaggaacagttgcgtcactctatgaaaagtgtcccgtcctttttccatccggatcccttaacaaagtataagatatccaaagaaaaatgtcaagaaatgttttcttttgttccagaattacgctatgtctctattgaatctatacacaaatctttaaaatccttctggttgaacttccatccacaatacggtttacttcacaaaccctcttttcacgttgataaacagcctgcaattttgaatttggcattgattatgactggcgcaagttttttgggaagcgagtatcgtgaacagattagtgacccaatttgtggtcctttgagatggataattttttctcatgctgattttcaaccaccttctaaaacctacatcattcaaagtttattattagtcgaaggatatgaaaaaacaagtacgaacaggtatttacatgaaaggtcttttttacatcacggaacgaccattcaattgttgaggagaacgccctctttaggcggccatcccttaatggtcaaaaccggcaaaacctctggggaaaattctattcaagacccacaagaagtttataaaagatggattgattttgaaatgttgaaaagaatagctttctacgcattttatatggacactacacatgctgtagtgtttggatactggaatttatttattaatagcaatcagattcaattgactttaccctgtccagatcaagtgtgggaatcttatgatttgagctatgaaactttaatggagcatgggtatggcagcacaaagagagatgagaataatacatttttgtctgcgttaatgcaattaatgaaaaatgtcattcaaatcttaagaaataataatataagaagaaacaaagtcaacaatggtggaatagagagtacccctacagacttggaaagcactacagattggaatattcagagtctttttggtaaaaagattcttttggcggggataatttccatcttatttcaatgtcaagaggaagttaatggtgactatttcattactaactttaggggcggaatcactgatcatttaggcctttcttggaaagatattttatcttttgcaatgaactattggcttcacgaagttcagaaaagctgcactgatccgaaagcatgtaggataagtactccatctgaggagacattaacgaacagaaaaattgacgaggataatggagatggattatgtgatgatgatttggacttgctttcctccgataatccgtccaattgtaaaattcccgttattcatatctctcaaattgtcttgcgtattcttcatcatgattattacatatatgcaggagcaccttggagaatgaatgtaccaattggtcgcgatgaatatgacatgatcagtcgcaggattctccagttcgctaaggacccctacaatgggggtgtagctgtagtctatgccttccagttcttatttgaaatgtttatcattaaggaaaataacgttccaaccgtagtgaagagctacaatataaattctgatcctgtgattactagaccctatgcgattgcattaacttctctcttgatttggtcttgtaattttgcattacatggctgtgaagttagcatatgggataatacagaagcctccaaggatgaatgctttcaaccagatgacagcaatggtggaaacattttgggcaatactgataataatggaagtacgattgcaaacaacaatttaaaggaaaagaacaattacattccaatagaaagttttgaagtttacttgttgagaatgtatagaaacttatatgtggatagctctctcgatgtagttagctttcagaatgacgtttgggcaaaagcgagtttacttcaacatatttctaatacccactttttatgcgggatgatgcagtttatgagagatattttcaacaagagctactgggatttagggcgcgaattcggaaaactcttcgataattgtttggaaaggagcttagggaaaacgtctcccacttgtcataacatgtttgatgtttga

SEQ ID NO: 11475 - DNA, 1206 bp, Saccharomyces cerevisiae
atggttgatttggagcaggaatttgcgctcggtgggcggtgtctggcattccatggtcctcttatgtatgaagcaaagatcttgaaaatatgggatccatcttcgaaaatgtataccagcattcctaatgacaagccaggtggtagttcacaagcaactaaggaaataaagccacaaaagctgggagaagatgaaagcattccagaagagatcattaatgggaagtgttttttcatacattaccaaggctggaagtcgagttgggatgagtgggttggatatgataggatacgggcctacaatgaagagaatattgccatgaaaaaaagactggcgaacgaggcgaaagaagctaagaaatcgttactggaacagcagaaaaaaaagaagctctccactagtctgggagggcctagtaatggtggaaaaagaaagggagacagccgctcgaatgctagtataagtaagagcacttcacagagttttttaacatcttcagtgagcggcaggaaaagcggaagaagttccgctaattccctccatcctggcagctctttgcgctcgtcatccgaccaaaatgggaatgatgaccgcagaagatcttcttcgctatcgccaaatatgctacatcatattgccggctatccaacccccaagatttcccttcaaattcccataaaattgaagagcgtgttagtcgacgattgggaatacgtaacgaaggacaaaaaaatttgcagactacccgctgatgtgacggtagagatggtactgaataaatacgaacatgaagtgagtcaagaattggaatcgccagggtcccagtcacagttgagcgaatactgtgccggtctcaagttgtattttgacaagtgcctgggtaatatgcttttatataggttggaacggctgcaatatgacgaacttctgaaaaaatcatcgaaggatcaaaagccactagtaccaattagaatttatggggctatccatctgttaaggttgataagtgttttaccagagctgatctcgtctactacaatggatctacaaagctgtcagcttttaatcaaacaaaccgaagacttcttggtttggttgttgatgcatgtggacgaatacttcaatgacaaggatccaaatagaagtgacgatgctctgtatgtaaatacgtctagccaatacgaaggagtggctttaggtatgtga

SEQ ID NO: 11476 - DNA, 1206 bp, Artificial Sequence
  Description of Artificial Sequence: Synthetic polynucleotide
atggttgatttggagcaggaatttgcgctcggtgggcgttgtttggcattccatggtcctcttatgtatgaagcaaagatcttgaaaatatgggatccatcttctaaaatgtataccagcattcctaatgacaagccaggtggtagttctcaagcaactaaggaaataaagccacaaaagttgggagaagatgaaagcattccagaagagatcattaatgggaagtgttttttcatacattaccaaggctggaagagtagttgggatgagtgggttggatatgataggataagagcctacaatgaagagaatattgccatgaaaaaaagattagcgaacgaggcgaaagaagctaagaaatctttattggaacagcagaaaaaaaagaagctctccactagtttgggagggcctagtaatggtggaaaaagaaagggagacagccgcagtaatgctagtataagtaagagcacttctcagagttttttaacatcttctgtgagcggcaggaaaagcggaagaagttccgctaattccctccatcctggcagctctttgcgctcttcttccgaccaaaatgggaatgatgaccgcagaagatcttcttctttatctccaaatatgttgcatcatattgccggctatccaacccccaagatttcccttcaaattcccataaaattgaagagcgtgttagtcgacgattgggaatacgtaacgaaggacaaaaaaatttgcagattacccgctgatgtgacggtagagatggtattgaataaatacgaacatgaagtgagtcaagaattggaatctccagggtcccagtctcagttgagcgaatactgtgccggtctcaagttgtattttgacaagtgcttgggtaatatgcttttatataggttggaaagattacaatatgacgaacttttgaaaaaaagctctaaggatcaaaagccattagtaccaattagaatttatggggctatccatcttttaaggttgataagtgttttaccagagttgatctcttctactacaatggatttgcaaagctgtcagcttttaatcaaacaaaccgaagacttcttggtttggttgttgatgcatgtggacgaatacttcaatgacaaggatccaaatagaagtgacgatgctttgtatgtaaatacgtctagccaatacgaaggagtggctttaggtatgtga

SEQ ID NO: 11477 - DNA, 2244 bp, Saccharomyces cerevisiae
atgaacgtttcaaaaatacttgtgtcgcccacggtcacgacaaatgttttacgcatatttgctcccaggctacctcaaatcggtgcttctttgttagttcaaaaaaaatgggccttaagatcaaagaagttctaccgtttttattctgaaaagaatagcggtgaaatgcctcctaagaaggaagctgatagctctggaaaggcatccaataaatccacgatatcttcaatcgacaattcgcaaccaccacctccatcgaacactaatgataaaaccaaacaagcgaacgtagctgtgtcacatgctatgctagcaactagagaacaagaggccaataaagacttaacgagtcctgatgcacaagcagccttttacaaacttctcttacaatcaaactacccgcaatacgtggtctctaggtttgagacccccggtattgcgtcatcgcctgaatgcatggaactgtacatggaggccctgcagaggataggcagacactcggaggctgatgccgttagacaaaacctactgacagccagctctgctggcgcagttaacccatcattggcgtcatcttcatcaaaccagtcaggttatcatggtaactttccatcgatgtattctccgctttatggatctcgcaaagagccactacatgttgtcgtatctgaatcaacttttactgttgtatcgagatgggtaaagtggctgcttgttttcggtatcttaacctactctttttctgaaggttttaaatacatcacagaaaatacaacgctactaaagtcgtcagaagtagccgacaaatcagttgatgtagctaagacaaatgttaaatttgatgatgtctgcggttgtgatgaggcccgtgcggaattggaagaaattgttgatttcctgaaagatccaactaagtacgagtccttgggtggtaaactaccaaagggtgtactgttgactggacctcctggtacaggtaaaactttgttggctagggccactgccggagaggctggtgtagattttttctttatgtcaggttctgaatttgatgaagtttacgtcggtgttggtgctaaacgtatccgtgatttgtttgctcaagcgcgttctcgtgcaccagctattatttttattgatgaattagatgccatcggtggtaagcgtaatccaaaggaccaagcttacgccaaacaaacgttgaatcagttattggtcgaattagatggtttctcacaaacaagtggaattattattattggtgccacaaatttccctgaggctttagataaggcgttaactagaccaggtagatttgataaggttgtgaatgtggatttgccagatgttcgtggtcgtgctgatattttaaagcatcacatgaagaagattacattggcagacaatgtggatccaactattattgcgcgtggtacccccggtttatcaggcgctgagctggcaaatttagtcaaccaagcagcagtttacgcgtgtcaaaaaaatgctgtttccgttgatatgtcccacttcgagtgggctaaggataagatattgatgggtgctgagagaaagactatggtcttaacagatgcagccagaaaggccactgctttccacgaggctggacatgccattatggccaaatacaccaatggtgctaccccgctatacaaggccacgatattgcctagaggtagggcattgggtattacttttcaattgccagaaatggataaggtcgacatcaccaaaagggagtgtcaagccagactggacgtgtgcatggggggcaaaattgcagaagaattaatttatggtaaagataacaccacaagtggttgtgggtctgacttgcaaagcgccaccggcacagcaagggctatggttactcaatatggtatgagtgatgatgtaggtcccgttaacttgtcagaaaattgggaatcttggtctaataagattcgcgatattgctgataatgaagtgattgaacttttgaaggactccgaggaaagagcaagaagactattaactaagaaaaatgttgagctacatagacttgcgcaaggtcttattgaatatgaaactctagatgcccacgaaatcgaacaagtttgtaaaggtgaaaaactggacaaactgaaaacttccaccaatacagtcgtagaaggaccagacagtgatgaacgtaaagatataggcgatgataaacccaaaattcctacaatgttaaatgcatga

SEQ ID NO: 11478 - DNA, 2244 bp, Artificial Sequence
  Description of Artificial Sequence: Synthetic polynucleotide
atgaacgtttccaaaatacttgtgtctcccacggtcacgacaaatgttttacgcatatttgctcccaggttgcctcaaatcggtgcttctttgttagttcaaaaaaaatgggccttaagatccaagaagttctaccgtttttattctgaaaagaatagcggtgaaatgcctcctaagaaggaagctgatagctctggaaaggcatccaataaatccacgatatcttctatcgacaattctcaaccaccacctccatctaacactaatgataaaaccaaacaagcgaacgtagctgtgtctcatgctatgttagcaactagagaacaagaggccaataaagacttaacgagtcctgatgcacaagcagccttttacaaacttctcttacaaagtaactacccgcaatacgtggtctctaggtttgagacccccggtattgcgtcttctcctgaatgcatggaattatacatggaggccttgcagaggataggcagacacagcgaggctgatgccgttagacaaaacttattaacagccagctctgctggcgcagttaacccatctttggcgtcttcttcttccaaccagtctggttatcatggtaactttccaagcatgtattctccgctttatggatctcgcaaagagccattgcatgttgtcgtatctgaatctacttttactgttgtatctagatgggtaaagtggttacttgttttcggtatcttaacctactctttttctgaaggttttaaatacatcacagaaaatacaacgttattgaagagttctgaagtagccgacaaatctgttgatgtagctaagacaaatgttaaatttgatgatgtctgcggttgtgatgaggcccgtgcggaattggaagaaattgttgatttcttgaaagatccaactaagtacgagtccttgggtggtaaattaccaaagggtgtacttttgactggacctcctggtacaggtaaaactttgttggctagggccactgccggagaggctggtgtagattttttctttatgagtggttctgaatttgatgaagtttacgtcggtgttggtgctaaacgtatccgtgatttgtttgctcaagcgcgttctcgtgcaccagctattatttttattgatgaattagatgccatcggtggtaagcgtaatccaaaggaccaagcttacgccaaacaaacgttgaatcagttattggtcgaattagatggtttctctcaaacaagtggaattattattattggtgccacaaatttccctgaggctttagataaggcgttaactagaccaggtagatttgataaggttgtgaatgtggatttgccagatgttcgtggtcgtgctgatattttaaagcatcacatgaagaagattacattggcagacaatgtggatccaactattattgcgcgtggtacccccggtttaagtggcgctgagttggcaaatttagtcaaccaagcagcagtttacgcgtgtcaaaaaaatgctgtttccgttgatatgtcccacttcgagtgggctaaggataagatattgatgggtgctgagagaaagactatggtcttaacagatgcagccagaaaggccactgctttccacgaggctggacatgccattatggccaaatacaccaatggtgctaccccgttgtacaaggccacgatattgcctagaggtagggcattgggtattacttttcaattgccagaaatggataaggtcgacatcaccaaaagggagtgtcaagccagattagacgtgtgcatggggggcaaaattgcagaagaattaatttatggtaaagataacaccacaagtggttgtgggtctgacttgcaaagcgccaccggcacagcaagggctatggttactcaatatggtatgagtgatgatgtaggtcccgttaacttgagtgaaaattgggaatcttggtctaataagattcgcgatattgctgataatgaagtgattgaacttttgaaggactccgaggaaagagcaagaagattattaactaagaaaaatgttgagttacatagacttgcgcaaggtcttattgaatatgaaactttagatgcccacgaaatcgaacaagtttgtaaaggtgaaaaattagacaaattgaaaacttccaccaatacagtcgtagaaggaccagacagtgatgaacgtaaagatataggcgatgataaacccaaaattcctacaatgttaaatgcatga

SEQ ID NO: 11479 - DNA, 1182 bp, Saccharomyces cerevisiae
atgacggatattcaactaaatggaaagagtacattagatactccttctgctaccatgtcagcaaaagaaaaagaggcaaaattaaaatcggctgatgagaataacaagccaccgaactacaaaagaatttctgacgatgatttatataggcactcttctcagtatagaatgtggtcatacactaaagatcaacttcaggagaaaagggtagataccaatgcccgagcgattgcttacattgaggaaaatttattaaaatttagagaagcacacaatttaacagaagaagaaataaaagtactagaagcaaaggctatccctttgacaatggaagaagaactcgatttggtgaatttctacgcaaaaaaagttcaggtaatagcacagcatctaaatttgccaaccgaagtagtggccactgcgatatccttttttaggcgttttttcttagaaaattctgttatgcaaatagatcctaaaagtattgtacatactactatctttctagcctgcaaatcggagaactattttattagcgtggactcgtttgctcaaaaggccaaatctactagagatagtgttctcaaattcgagtttaagttgttagaatcattgaaattttcactgttgaaccatcatccttacaaaccgcttcatgggtttttcttagatatccagaacgtcctttatggtaaggttgatttaaattacatgggccaaatatacgataggtgtaagaagagaataactgccgcattattaaccgatgtcgtatatttctacactccaccccaaataacactagcaacattattgattgaggatgaagccttggtcacaaggtatttagaaacaaaatttcccagcagagaaggtagccaggaatcagtaccgggaaacgaaaaagaagaaccacaaaatgatgccagtacaactgagaaaaacaaagagaagtccacagagagcgaagaatattcgatagactccgcgaagttactaaccataatacgcgagtgtaaaagtattattgaagattgtaaacctccgagtactgaagaggccaagaaaattgcggcaaaaaactattattgtcaaaatccatcaacactgattcagaaattaaaaaggaagttgaatggagaagatacttcgtccaccgttgagaaaaagcaaaaaacatga

SEQ ID NO: 11480 - DNA, 1182 bp, Artificial Sequence
  Description of Artificial Sequence: Synthetic polynucleotide
atgacggatattcaattgaatggaaagagtacattagatactccttctgctaccatgtctgcaaaagaaaaagaggcaaaattaaaatctgctgatgagaataacaagccaccgaactacaaaagaatttctgacgatgatttatataggcactcttctcagtatagaatgtggagttacactaaagatcaacttcaggagaaaagggtagataccaatgcccgtgcgattgcttacattgaggaaaatttattaaaatttagagaagcacacaatttaacagaagaagaaataaaagtattggaagcaaaggctatccctttgacaatggaagaagaactcgatttggtgaatttctacgcaaaaaaagttcaggtaatagcacagcatttgaatttgccaaccgaagtagtggccactgcgatatccttttttaggcgttttttcttagaaaattctgttatgcaaatagatcctaaaagtattgtacatactactatctttttggcctgcaaaagtgagaactattttattagcgtggactcttttgctcaaaaggccaaatctactagagatagtgttctcaaattcgagtttaagttgttagaatctttgaaattttctttgttgaaccatcatccttacaaaccgcttcatgggtttttcttagatatccagaacgtcctttatggtaaggttgatttaaattacatgggccaaatatacgataggtgtaagaagagaataactgccgcattattaaccgatgtcgtatatttctacactccaccccaaataacattagcaacattattgattgaggatgaagccttggtcacaaggtatttagaaacaaaatttcccagcagagaaggtagccaggaaagtgtaccgggaaacgaaaaagaagaaccacaaaatgatgccagtacaactgagaaaaacaaagagaagtccacagagagcgaagaatattctatagactccgcgaagttattaaccataatacgcgagtgtaaaagtattattgaagattgtaaacctccgagtactgaagaggccaagaaaattgcggcaaaaaactattattgtcaaaatccatctacattaattcagaaattaaaaaggaagttgaatggagaagatacttcttccaccgttgagaaaaagcaaaaaacatga

SEQ ID NO: 11481 - DNA, 3636 bp, Saccharomyces cerevisiae
atgaaaagaataagatcgctttggttcaatgcggaggcttcttattcaaaccttaacaattctcctagtttgaggaacaaaaatagtaccggtaataactctcgctctaaaaattatcgttctttctcaaggtttgacttgatcaactctatacttttactgatgatgctatttttattagctatcttcgtcactgcattatatttaacaaagagttccaggcttacatactcacatgcctcgagggctgccctatttaaccctctgggtgtgatatcgccgtcattgggaaatcatacgttgaactacgatccagaagcaagggaatcttctaaaaaactttatgaactcctttctgatttcaacacggcatattatgatgatgagaacatgattttgggaagtaacttgttctcaaagaatacatactcgagacaaccatatgttgctaacggttatataggtagtcgtattcccaatattgggttcggctatgccttagacaccctgaatttttacacagacgcaccaggcgctttgaataacggttggcccttaagaaatcatagatttgccggtgcgtttgtatcggacttttattgtctacaaccaaaactaaattcaacaaacttcccagaattggatgatgtaggatattccactgtcatttcatctattccacaatggaccaatctacagttctcattagtgaatgattctaagtggttcaatccacaaaatgttacgttggatgacgtaactaattatagccaaaacttatcaatgaaggatggtatcgtaactacggagttagattggctaaacagtcaaatacatgttaaaagtgaaatctgggcacatcggcacattcatccactgggagtggtttctttggaaatttccctgaatacggaccatttaccttcggattttgattcattagatgttaatatatgggatatacttgatttcaacacatcacataggactgttctacatagcacgggaacagacgaaaaaaataatgcggttttcatgattgttcagccagataacgttccatcttctaattgcgctatttactcaacgtgtactgtaaagtatgaaaattccaccaatccaataaattctagtgaatcttttgaagaaaaagatgtttcttctaatatttataatgttattttgacagaggaccaacccaagataatcgttcataagtatgttggtattatgtctactgagttcaataagaacaaagaacaacaagacaatactaatattggtttggccaaaatgatagctctaaacagtaaaggcaattacgagaagcttctgtcaagtcacaaacgtgcgtggtatgacctttacaacgacgccttcattgaaattccttctgacagtcttttagaaatgacagcaagatcgtccctattccatttactagcaaatacaagagattacaatgtctcgagcgataggggtcttcccgtgggagtttctggtttgtcatcagattcctatggtggtatggtgttctgggacgcagatatatggatggaacctgccctattgcctttcttcccaaatgtggctcaaaatatgaataattacagaaatgctacacattcgcaggcaaagttaaatgcagagaaatatggataccccggagcaatatacccctggacatctggtaagtacgctaattgtacttctacgggaccttgtgtcgattacgaataccatattaacgttgatgtcgctatggcctccttttccatatacttgaatggacacgaagggattgatgacgagtatctgagatatactacatggccaattatcaaaaacgcagcccaattttttactgcttatgttaagtacaattcttccctaggattgtatgaaacatataatttgacagatcccgacgagtttgctaatcacatcaataacggggctttcacgaatgctggcattaaaacacttctaaagtgggcaacagacattggcaatcatctcggcgaggtcgttgaccccaaatggagtgaaatttccaaagatatttatatccctagatcctcatctaacatcactttggaatattctggtatgaatagctcagtggagattaaacaggcggatgtgactttaatggtttacccacttggatatatcaatgatgaatccatattgaacaatgcaattaaagatctttattattattcagaaagacagtctgcgtctgggcctgcaatgacatatccggtttttgtggccgcagctgctggtctgctgaatcacggctcttcttctcaaagttacttatataaatcggttcttccatacttacgggctcctttcgctcaatttagtgagcaatcagacgacaactttttaacaaacggattaacccagccagcattcccctttttaacagctaacggtggatttctacagagcattctgtttgggttaacaggaatccgatattcttatgaggttgatccagatactaaaaaaattaaccgtttgttaaggttcaatccaatagaactaccgttgctccctggtggtatcgctattagaaacttcaaatatatgaaccaagttttagatataataattgacgaccacaatggtacgattgttcataaatcaggagatgttcctattcatataaagataccaaacagatctctaatacatgaccaggatatcaacttctataatggttccgaaaacgaaagaaaaccaaatctagagcgtagagacgtcgaccgtgttggtgatccaatgaggatggataggtatggtacctattatcttttaaaaccgaaacaagagcttacagtccaactgttcaagcctggcttaaacgcaagaaacaacatagcggaaaataagcaaataacaaacttgacggccggcgttcctggtgacgttgcattctctgctctagatgggaataattacacgcattggcaacccttagacaaaattcaccgtgcgaagctattgattgatttaggtgaatacaacgagaaagagattaccaagggaatgattctttgggggcagaggcccgcaaaaaacatttccatatctattttgcctcattctgaaaaagtcgaaaatttatttgcgaacgtgacagaaattatgcaaaattcgggaaatgatcaacttcttaatgaaaccattggtcagcttttagataatgccggaattcctgtcgagaacgttattgattttgatggcatagaacaagaggatgatgaatctttggatgatgtgcaagccttattgcactggaagaaggaagacttagccaagctaattgaacaaatacccagacttaactttctaaaaagaaaatttgtgaaaattctggataacgtgccagtgagcccaagtgagccatactacgaagcaagtcgcaaccagtcgttaatcgagatattacccagtaatagaacgactttcactattgattatgataaattgcaggtgggtgataaagggaacacagattggaggaaaacaagatacatagttgtggcagtacaaggagtgtatgatgattatgatgatgataacaaaggagctacaatcaaggaaattgttctcaatgattaa

SEQ ID NO: 11482 - DNA, 3636 bp, Artificial Sequence
  Description of Artificial Sequence: Synthetic polynucleotide
atgaaaagaataagatctctttggttcaatgcggaggcttcttattccaaccttaacaattctcctagtttgaggaacaaaaatagtaccggtaataactctcgctctaaaaattatcgttctttctctaggtttgacttgatcaactctatacttttattgatgatgttatttttattagctatcttcgtcactgcattatatttaacaaagagttccaggcttacatactctcatgcctctagggctgccttatttaaccctttaggtgtgatatctccgtctttgggaaatcatacgttgaactacgatccagaagcaagggaatcttctaaaaaactttatgaactcctttctgatttcaacacggcatattatgatgatgagaacatgattttgggaagtaacttgttctccaagaatacatactctagacaaccatatgttgctaacggttatataggtagtcgtattcccaatattgggttcggctatgccttagacaccttgaatttttacacagacgcaccaggcgctttgaataacggttggcccttaagaaatcatagatttgccggtgcgtttgtaagtgacttttattgtttgcaaccaaaattgaattctacaaacttcccagaattggatgatgtaggatattccactgtcatttcttctattccacaatggaccaatttacagttctctttagtgaatgattctaagtggttcaatccacaaaatgttacgttggatgacgtaactaattatagccaaaacttatctatgaaggatggtatcgtaactacggagttagattggttgaacagtcaaatacatgttaaaagtgaaatctgggcacataggcacattcatccattaggagtggtttctttggaaatttccttgaatacggaccatttaccttctgattttgattctttagatgttaatatatgggatatacttgatttcaacacatctcataggactgttttgcatagcacgggaacagacgaaaaaaataatgcggttttcatgattgttcagccagataacgttccatcttctaattgcgctatttactctacgtgtactgtaaagtatgaaaattccaccaatccaataaattctagtgaatcttttgaagaaaaagatgtttcttctaatatttataatgttattttgacagaggaccaacccaagataatcgttcataagtatgttggtattatgtctactgagttcaataagaacaaagaacaacaagacaatactaatattggtttggccaaaatgatagctttgaacagtaaaggcaattacgagaagcttttatccagtcacaaacgtgcgtggtatgacctttacaacgacgccttcattgaaattccttctgacagtcttttagaaatgacagcaagaagttcccttttccatttattggcaaatacaagagattacaatgtctccagcgataggggtcttcccgtgggagtttctggtttgagttctgattcctatggtggtatggtgttctgggacgcagatatatggatggaacctgccttattgcctttcttcccaaatgtggctcaaaatatgaataattacagaaatgctacacattctcaggcaaagttaaatgcagagaaatatggataccccggagcaatatacccctggacatctggtaagtacgctaattgtacttctacgggaccttgtgtcgattacgaataccatattaacgttgatgtcgctatggcctccttttccatatacttgaatggacacgaagggattgatgacgagtatttaagatatactacatggccaattatcaaaaacgcagcccaattttttactgcttatgttaagtacaattcttccttgggattgtatgaaacatataatttgacagatcccgacgagtttgctaatcacatcaataacggggctttcacgaatgctggcattaaaacacttttgaagtgggcaacagacattggcaatcatctcggcgaggtcgttgaccccaaatggagtgaaatttccaaagatatttatatccctagatcctcttctaacatcactttggaatattctggtatgaatagctctgtggagattaaacaggcggatgtgactttaatggtttacccacttggatatatcaatgatgaatccatattgaacaatgcaattaaagatctttattattattctgaaagacagtctgcgtctgggcctgcaatgacatatccggtttttgtggccgcagctgctggtttattgaatcacggctcttcttctcaaagttacttatataaatctgttcttccatacttaagagctcctttcgctcaatttagtgagcaatctgacgacaactttttaacaaacggattaacccagccagcattcccctttttaacagctaacggtggatttttgcagagcattttatttgggttaacaggaatcagatattcttatgaggttgatccagatactaaaaaaattaaccgtttgttaaggttcaatccaatagaattaccgttgctccctggtggtatcgctattagaaacttcaaatatatgaaccaagttttagatataataattgacgaccacaatggtacgattgttcataaaagtggagatgttcctattcatataaagataccaaacagatctttgatacatgaccaggatatcaacttctataatggttccgaaaacgaaagaaaaccaaatttggagcgtagagacgtcgaccgtgttggtgatccaatgaggatggataggtatggtacctattatcttttaaaaccgaaacaagagcttacagtccaattattcaagcctggcttaaacgcaagaaacaacatagcggaaaataagcaaataacaaacttgacggccggcgttcctggtgacgttgcattctctgctttagatgggaataattacacgcattggcaacccttagacaaaattcaccgtgcgaagttgttgattgatttaggtgaatacaacgagaaagagattaccaagggaatgattctttgggggcagaggcccgcaaaaaacatttccatatctattttgcctcattctgaaaaagtcgaaaatttatttgcgaacgtgacagaaattatgcaaaattctggaaatgatcaacttcttaatgaaaccattggtcagcttttagataatgccggaattcctgtcgagaacgttattgattttgatggcatagaacaagaggatgatgaatctttggatgatgtgcaagccttattgcactggaagaaggaagacttagccaagttgattgaacaaatacccagacttaactttttgaaaagaaaatttgtgaaaattttagataacgtgccagtgagcccaagtgagccatactacgaagcaagtcgcaaccagtctttaatcgagatattacccagtaatagaacgactttcactattgattatgataaattgcaggtgggtgataaagggaacacagattggaggaaaacaagatacatagttgtggcagtacaaggagtgtatgatgattatgatgatgataacaaaggagctacaatcaaggaaattgttctcaatgattga

SEQ ID NO: 11483 - DNA, 834 bp, Saccharomyces cerevisiae
atggttggtatttacagaatacttgcttcgttcgtcccactcctgggtcttctttttgcattccatgatgatgacatgatagatactgttacaatcatcaaaactgtatatgaaacggtgacatcaacttctactgcacctgcacctgccgctacaaaatctgttagtgaaaagaaactggatgacactaaactaacacttcaagtaattcaaactatggtatcatgtttttctgtaggtgaaaatccggccaatatgatatcctgtgggctaggagttgtaatcttaatgttttcattaatcatcgagcttatcaacaagctcgaaaatgatggtatcaatgaaccgcaaaggttatatgacctaattaaaccaaaatacgtcgagctaccttcaaattatgtgaatgaaaaaatcaaaacaacatttgaacctctcgacctatacttaggagtaaatatgaatacttcaggaagtgaactaaaccaaaactgtttgattctcaaacttggcgagaagacggctctgcctttcccaggcttggcccagcagatttgttatacaaaaggcgcttcaaatgagttcacaaattataaattatcggacatacagggcaatttaaacgaaaacagccaaggaattgctaatggcgttttccagaaaatatcaaacattagaaaaatatcaggtaattttaagtctcagctttatcaaatttcagaaaaaatcaccgacgaaaattgggacggttctgctgtaggcttcactgctcatgggagagaaaaaggcccaaacaaatctcaaatatcggtttcattttatagggataattaa

SEQ ID NO: 11484 - DNA, 834 bp, Artificial Sequence
  Description of Artificial Sequence: Synthetic polynucleotide
atggttggtatttacagaatacttgcttctttcgtcccactcttaggtcttctttttgcattccatgatgatgacatgatagatactgttacaatcatcaaaactgtatatgaaacggtgacatctacttctactgcacctgcacctgccgctacaaaatctgttagtgaaaagaaattggatgacactaaattaacacttcaagtaattcaaactatggtatcttgtttttctgtaggtgaaaatccggccaatatgatatcctgtgggttgggagttgtaatcttaatgttttctttaatcatcgagcttatcaacaagctcgaaaatgatggtatcaatgaaccgcaaaggttatatgacttgattaaaccaaaatacgtcgagcttccttccaattatgtgaatgaaaaaatcaaaacaacatttgaacctctcgacttgtacttaggagtaaatatgaatacttctggaagtgaattgaaccaaaactgtttgattctcaaacttggcgagaagacggctttacctttcccaggcttggcccagcagatttgttatacaaaaggcgcttctaatgagttcacaaattataaattaagtgacatacagggcaatttaaacgaaaacagccaaggaattgctaatggcgttttccagaaaataagcaacattagaaaaatatctggtaattttaagtctcagctttatcaaatttctgaaaaaatcaccgacgaaaattgggacggttctgctgtaggcttcactgctcatgggagagaaaaaggcccaaacaaatctcaaatatctgtttctttttatagggataattga

SEQ ID NO: 11485 - DNA, 543 bp, Saccharomyces cerevisiae
atgtccgaatatgcatctagtattcactctcaaatgaaacaattcgataccaagtactctggtaatagaattttacagcaattagaaaataaaactaatttgcctaaatcttatttagttgctggtttaggtttcgcttatctccttttgatttttattaacgtcggaggtgtaggtgaaattctttccaattttgctgggtttgtgttgccagcatatttatcgttggttgctttgaagacaccaacgtccaccgatgacacacaactcttgacctactggattgtcttttcatttttgagtgtcattgaattctggtccaaggcaattctatatttgattccattctactggtttttgaaaaccgttttcttaatctacattgccttgcctcaaactggtggcgctagaatgatctatcaaaagatcgtagccccattgaccgacagatatatcctaagagatgttagcaagacagaaaaggatgaaattagagcttccgtcaatgaggcttctaaggctacaggtgcttctgttcattaa

SEQ ID NO: 11486 - DNA, 543 bp, Artificial Sequence
  Description of Artificial Sequence: Synthetic polynucleotide
atgtccgaatatgcatctagtattcactctcaaatgaaacaattcgataccaagtactctggtaatagaattttacagcaattagaaaataaaactaatttgcctaaatcttatttagttgctggtttaggtttcgcttatctccttttgatttttattaacgtcggaggtgtaggtgaaattctttccaattttgctgggtttgtgttgccagcatatttatctttggttgctttgaagacaccaacgtccaccgatgacacacaactcttgacctactggattgtcttttcttttttgagtgtcattgaattctggtccaaggcaattctttatttgattccattctactggtttttgaaaaccgttttcttaatctacattgccttgcctcaaactggtggcgctagaatgatctatcaaaagatcgtagccccattgaccgacagatatatcttaagagatgttagcaagacagaaaaggatgaaattagagcttccgtcaatgaggcttctaaggctacaggtgcttctgttcattga

SEQ ID NO: 11487 - DNA, 2499 bp, Saccharomyces cerevisiae
atgggctcttcgttgagaagctttatcaaagacgttcgtggtgccaaaacactggcagatgaaagggcaattataacgaaacaatctgctaaaattaggacaaaattgagagatgaccatctaccacatgaaaaaaggcgagtaaatatccagaaacttctgtatctatacattctaggggaaaagacacatttcggtcaggtggagtctatcaatttaattgcttctgacgattttgtcgataaaagattaggctatctggccgcaactttattgttggacgaatctgaagatttattgacactcttaacgaacatgttgaacaacgatttgcatcatcccaacaaatatgcagtgtcacttgcactaacctcattaggctttttgagctcccctgaattagccagagatttatacccagacgtcgaaaatatcatcaaaaattcaagagaccctttcctcttgaaaaaagcgcttcaatgtgctgccaaactaattttcaaagacgtttcacttttagaaatcttcaacatcgaagacattactaagatattgtctagtcattcaatatgtactcacggtgtacttttaggcgttacgaaaatcatacaatctattttgttaattggattgaacagaaaaaaagatgaggatgaagatgaagacggtattgattacagcaatgacatcttgtctccattatctttacttttgcgtgattttttcattcgtttggaaaatatgaattctaaaaatattgaacctggatatgatgtccaaggtatttgtgacccatttctgcagtgtgaaataatttacactttaaaactatactttcaagttggtgagctcttaaattcgaacaatgttttggactacaaagataatttctgcgatttattgactcgtattgcgacgaatacggattcaacgaaaaacagcggacaggccattctttatgagaccgtgaagacgatcttttcgttggatttgaaccagcctctacgtgtccttggtattaacatcttggccaagtttcttgcaggaaaagataataatactaaatacgtttcattaaacaccttattaaaagttgttccccaagagcctaccgcagtacaaaggcatagaaaattcatttctcattgtctgcaggataccgatgtgtcgatccgcatgagagcgttagagttgagcttcgccatcttggacgattcaaatttagtggaattggttaacgaattgatgaaatttttggcaaaacaggatgaagattcaaaagatctcataatatacactatagatcacttaattgacacttttgatacccgcgttgtcaaagatgaaagctggaaattagatgttttctttaatatcttaaaattagtgggatcgtttatcaactatgaaaaaattaatgatattctaatcataataaataatacgagccagttatccgacaaatctgaatttttacggaaaatgctgacaatttcactaaatggaacatcagcggagatttccgaggaaaatattggttggcagttggttttgatttggtgcattggcgaatatggcgatttagtactcaacgagggcaataaaaatggtgcagacataatcaatgagtcatctattactgattacttactaactttgcaagaactctacacagcaacgaatctgaagataatcaattacattttaacagcagcattaaaattatctgtgaggttccatgacgcgaaaaatattgaaaaactaagacaactgatattgagctacacggattccactgatttatcactgcaaatgaaaagcaatcaatacgagatatttttcaatcagtcaatttctgtgaagaagatcattttagaaacaatgcctaaatttgaaaaaattaccgaggaacaggataatggaaaagctctatcgaaaaaccttatctccaacgaaccagttgatctgctgtcagatttattgggtgaggatagcaaggctgaaagcaaggcttctactggtgacaatgtgaaaccaattgacatattagaagagatttttggagagaagaatgacattgctcaggtgcccaaaaatgcgaacaaggaagaatcaatcaatcattcgtcggcagtggaggcaaactcaggtgtcaccttaccattggatgccaacaagatatatgacagttcctcactgaatgtatatgcttccttgctctctgcaaactctggattagcacatttggatttatattttcaggcaaagtctttaatatctgacttaaaaactttctgtgccgttcctaaagctcaaaagctaacactaggccagttatatccatcttccacaataaacgccagccaaatttgcaagcagtcattgaaaatttctggatctgggaaactgaagttaagagttaagttggattttcatttaaatggctcttcatctatcaccaatgaacagttcgatcacaaattcgatgaaactctataa

SEQ ID NO: 11488 - DNA, 2499 bp, Artificial Sequence
  Description of Artificial Sequence: Synthetic polynucleotide
atgggctcttctttgagaagctttatcaaagacgttcgtggtgccaaaacattagcagatgaaagggcaattataacgaaacaatctgctaaaattaggacaaaattgagagatgaccatttaccacatgaaaaaaggcgtgtaaatatccagaaacttttatatttgtacattttgggggaaaagacacatttcggtcaggtggagtctatcaatttaattgcttctgacgattttgtcgataaaagattaggctatttggccgcaactttattgttggacgaatctgaagatttattgacactcttaacgaacatgttgaacaacgatttgcatcatcccaacaaatatgcagtgtctcttgcattgaccagtttaggctttttgagctcccctgaattagccagagatttatacccagacgtcgaaaatatcatcaaaaattctagagaccctttcctcttgaaaaaagcgcttcaatgtgctgccaaattgattttcaaagacgtttcccttttagaaatcttcaacatcgaagacattactaagatattgtctagtcattccatatgtactcacggtgtacttttaggcgttacgaaaatcatacaatctattttgttaattggattgaacagaaaaaaagatgaggatgaagatgaagacggtattgattacagcaatgacatcttgtctccattatctttacttttgcgtgattttttcattcgtttggaaaatatgaattctaaaaatattgaacctggatatgatgtccaaggtatttgtgacccatttttgcagtgtgaaataatttacactttaaaactttactttcaagttggtgagctcttaaatagcaacaatgttttggactacaaagataatttctgcgatttattgactcgtattgcgacgaatacggattctacgaaaaacagcggacaggccattctttatgagaccgtgaagacgatcttttctttggatttgaaccagcctttacgtgtccttggtattaacatcttggccaagtttcttgcaggaaaagataataatactaaatacgtttctttaaacaccttattaaaagttgttccccaagagcctaccgcagtacaaaggcatagaaaattcatttctcattgtttacaggataccgatgtgtccatccgcatgagagcgttagagttgagcttcgccatcttggacgattctaatttagtggaattggttaacgaattgatgaaatttttggcaaaacaggatgaagattctaaagatctcataatatacactatagatcacttaattgacacttttgatacccgcgttgtcaaagatgaaagctggaaattagatgttttctttaatatcttaaaattagtgggaagttttatcaactatgaaaaaattaatgatattttgatcataataaataatacgagccagttatccgacaaatctgaatttttaagaaaaatgttaacaatttctttgaatggaacatctgcggagatttccgaggaaaatattggttggcagttggttttgatttggtgcattggcgaatatggcgatttagtactcaacgagggcaataaaaatggtgcagacataatcaatgagtcttctattactgattacttattaactttgcaagaactctacacagcaacgaatttgaagataatcaattacattttaacagcagcattaaaattatctgtgaggttccatgacgcgaaaaatattgaaaaattgagacaattgatattgagctacacggattccactgatttatctttacaaatgaaaagcaatcaatacgagatatttttcaatcagagtatttctgtgaagaagatcattttagaaacaatgcctaaatttgaaaaaattaccgaggaacaggataatggaaaagctttatccaaaaaccttatctccaacgaaccagttgatttattaagtgatttattgggtgaggatagcaaggctgaaagcaaggcttctactggtgacaatgtgaaaccaattgacatattagaagagatttttggagagaagaatgacattgctcaggtgcccaaaaatgcgaacaaggaagaaagtatcaatcattcttctgcagtggaggcaaacagtggtgtcaccttaccattggatgccaacaagatatatgacagttcctctttgaatgtatatgcttccttgctctctgcaaactctggattagcacatttggatttatattttcaggcaaagtctttaatatctgacttaaaaactttctgtgccgttcctaaagctcaaaagttaacattaggccagttatatccatcttccacaataaacgccagccaaatttgcaagcagtctttgaaaatttctggatctgggaaattgaagttaagagttaagttggattttcatttaaatggctcttcttctatcaccaatgaacagttcgatcacaaattcgatgaaactttatga

SEQ ID NO: 11489 - DNA, 3366 bp, Saccharomyces cerevisiae
atgcaatctactgtcccaatagcaattgcgagcaacggcaacaagagagatgtcgtccagaacgtttctgcaggcgacgagggtgatatattgcaaaggctagcccgtaacagagagatgatttctacctccctctcgccacaaaaatcgtcaggatttagtggtagaaggaggtcatctagtgttagggacgccctttcttctttttttggaactggtaatagtccaacatctagtatggacgattattccaatttgatgaaccgtaactattctaccgcatcaactgccatgtgtagggggaacagttttccttcagatgttggcactaaggcttacaatattacgggatcttaccaaccggataggcacaggaattctgttccgtataccaccatagaccagttacacacaaggcaagacaccgggttgaggagagagtcagatccagtcgcggcaaaacaaatatctagtaataatgatattgttaggtcattcataacacatcatgctagtaatagcactatgtttattaatagggtgctatcggactatttagcggatcgtggtttcatcaagcaaacaccgttatataataagaaaagtgtgctggaaatttccattgcaacaagtgcagaatcagttttcttgccaactacaaaaagtgatgaaacagagtatctatcactgattcatggttctttaaatcaggcgcgaacacagcctgtcgggtccactaacactgcagaaagtgatttcctcccttcatgtcctacgatggacactttgaatgaaaacaatgatttatcactatttccgttacatacacagcgaaccagcccctctaatacagcaaggacaggtaatgctatggatacaagcaattctgatcgtgcttctccggcctcgaacaataacacaacagatgcggattcctttgttgcgagtggcaataacaaccctatgaataataacaattctcccgcgagaaacagacatcctaattctcactcgcgttctcttcctaatgcttggaatagccaaatgccttcattcagctttgcattgatattttccctgaataaatcaactaccctttctgatattaaagtagaactcacttctaacgtgagagtggtgtggttcaatggtcttccccctaccaagaatgttaacgaggaatgctataatataggttctttggactggaccttaaatgcagacaactttaatcttttcattccgcaaggcgcaaagtctcctcttgatatcgttgaaaatcattccaataacaggaaattgaaagtgctccagaaattatcgatgaggaaacgccgttctttctcgaataaagcagttcttagggaaaatatattaaacaatttaaatgcctcgaattctacgaacaagttaaatgctggtgtttatgtctttactatccccatagtgcttgccagtcgtattcctgaatcgctttactacccatcagcgagggtatcctacagcttaagattagcgacaaaattgaaggatgaacatacacagttggttgcatcacggccacgttcttcttctatctcttctcctcaaaaactgcgttcatattcctgttctgattcttatgaatattctcaaattgatgacaccatagaaggagaaacctacaataacgacaaaaattctactggaaaaatcgcatttccctcctcatggttaaaaagtgcgaaggggcgcttaaaaaggaataattctaacggaaggtcagataataatggcgcatcttctagtggtttagcgatgcaacatgattctgaagacactataaatttacagtacccgcttaatttggtgagaactccgccagaaatctctgtcactacagcaaataagccactttacattaacaaggtttgggagaattgtctttcttatgaaatttcattcgcccaaaagtatgtgcccttgaatggtgaaattccaatcacaattaaagtggcacctctagtaaaaagtcttagtgtcaagagaattcgtgttagttgtagagaaaaaatctcctacaggagtaaagactatcaatatgattttgaccagttggatccattggcttcagatccttgcaatccctatcatatgagatatttagtgagaaaaaagaaggacagaagcttgcctctatttgaggtggcctctaaatgtactagtgggccttctattagagaggaagttgtcaccaatacagttgatgataacttattagcctacacttcatcaaaagaaaacaacaaagatatcccattttctgagtcctttactgttaaaacgaagttaaaatttccaaaatattgtgaagtggacgctaccaaagctgcaagtctaccaccatatggtatcgatcttttcgacccaataaaagatccaactcagagtgagaacacctctaataacggcaatgtattgggctttctagtgggtcgccctaacagggcttccaagacagttcataaaataccgcaagacaagaatcataatgaggtcaatgatacaaatggaaactcgaatacatctttgcaaactagctcgaatgttcccattcagcactacacacggttgaataaaccaagacgcggtttatatttggacagtatgcattttaagaatatccaatgttctcataaattagaaatcgtcttgagggttagcaaaactgatagtggtagctcaaaaatcataaggcattatgaagtaattgttgatacaccaatttatttgatttctgacctttgtaacacttcaaatatagacttaccgacttatgacatggccaccactgaatcttctaaagtcctgccaccaacttttgaagaggcaacatcagtttcagcatcaccaagatcttctgtatcttattatcccgatgacatttccatgcaacagttgaatttgtctaggtcgacttccctcgcaaatggttacctgtcaaccttacatccaaaaacaaccgctgtttcggactcgtctaacggtgccccaatccgggaccagcaagagcaacaagcacgccccttgaggactgaagattatgcgctacaaatggggaatgaaaataacgcctatagcaatatggacggtttgctttcgcaggatatctttgaacaggagaccgcggccacgctatttaaaagagacattgtcacaatgaactttaacaataatatattcacaccacggtatagtccgcgcacttttaccaataccgactacaattataatgataatgataataatgataatgatacagaggggcctggtccaataattcatccgggtcctgaaccaccaagatatgacgagatttcatcataa

SEQ ID NO: 11490 - DNA, 3366 bp, Artificial Sequence
  Description of Artificial Sequence: Synthetic polynucleotide
atgcaatctactgtcccaatagcaattgcgagcaacggcaacaagagagatgtcgtccagaacgtttctgcaggcgacgagggtgatatattgcaaaggttggcccgtaacagagagatgatttctacctccctctctccacaaaaatcttctggatttagtggtagaaggaggtcttctagtgttagggacgccctttcttctttttttggaactggtaatagtccaacatctagtatggacgattattccaatttgatgaaccgtaactattctaccgcatctactgccatgtgtagggggaacagttttccttctgatgttggcactaaggcttacaatattacgggatcttaccaaccggataggcacaggaattctgttccgtataccaccatagaccagttacacacaaggcaagacaccgggttgaggagagagtctgatccagtcgcggcaaaacaaatatctagtaataatgatattgttaggtctttcataacacatcatgctagtaatagcactatgtttattaatagggtgttaagtgactatttagcggatcgtggtttcatcaagcaaacaccgttatataataagaaaagtgtgttggaaatttccattgcaacaagtgcagaatctgttttcttgccaactacaaaaagtgatgaaacagagtatttatctttgattcatggttctttaaatcaggcgagaacacagcctgtcgggtccactaacactgcagaaagtgatttcctcccttcttgtcctacgatggacactttgaatgaaaacaatgatttaagtttatttccgttacatacacagcgtaccagcccctctaatacagcaaggacaggtaatgctatggatacaagcaattctgatcgtgcttctccggcctccaacaataacacaacagatgcggattcctttgttgcgagtggcaataacaaccctatgaataataacaattctcccgcgagaaacagacatcctaattctcacagtcgttctcttcctaatgcttggaatagccaaatgccttctttcagctttgcattgatattttccttgaataaatctactaccctttctgatattaaagtagaactcacttctaacgtgagagtggtgtggttcaatggtcttccccctaccaagaatgttaacgaggaatgctataatataggttctttggactggaccttaaatgcagacaactttaatcttttcattccgcaaggcgcaaagtctcctcttgatatcgttgaaaatcattccaataacaggaaattgaaagtgctccagaaattatctatgaggaaacgccgttctttcagtaataaagcagttcttagggaaaatatattaaacaatttaaatgcctctaattctacgaacaagttaaatgctggtgtttatgtctttactatccccatagtgcttgccagtcgtattcctgaatctctttactacccatctgcgagggtatcctacagcttaagattagcgacaaaattgaaggatgaacatacacagttggttgcaagcagaccacgttcttcttctatctcttctcctcaaaaattacgttcttattcctgttctgattcttatgaatattctcaaattgatgacaccatagaaggagaaacctacaataacgacaaaaattctactggaaaaatcgcatttccctcctcttggttaaaaagtgcgaaggggcgcttaaaaaggaataattctaacggaaggtctgataataatggcgcatcttctagtggtttagcgatgcaacatgattctgaagacactataaatttacagtacccgcttaatttggtgagaactccgccagaaatctctgtcactacagcaaataagccactttacattaacaaggtttgggagaattgtctttcttatgaaatttctttcgcccaaaagtatgtgcccttgaatggtgaaattccaatcacaattaaagtggcacctttggtaaaaagtcttagtgtcaagagaattcgtgttagttgtagagaaaaaatctcctacaggagtaaagactatcaatatgattttgaccagttggatccattggcttctgatccttgcaatccctatcatatgagatatttagtgagaaaaaagaaggacagaagcttgcctttatttgaggtggcctctaaatgtactagtgggccttctattagagaggaagttgtcaccaatacagttgatgataacttattagcctacacttcttctaaagaaaacaacaaagatatcccattttctgagtcctttactgttaaaacgaagttaaaatttccaaaatattgtgaagtggacgctaccaaagctgcaagtttaccaccatatggtatcgatcttttcgacccaataaaagatccaactcagagtgagaacacctctaataacggcaatgtattgggctttttagtgggtcgccctaacagggcttccaagacagttcataaaataccgcaagacaagaatcataatgaggtcaatgatacaaatggaaacagtaatacatctttgcaaactagcagtaatgttcccattcagcactacacaagattgaataaaccaagacgcggtttatatttggacagtatgcattttaagaatatccaatgttctcataaattagaaatcgtcttgagggttagcaaaactgatagtggtagcagtaaaatcataaggcattatgaagtaattgttgatacaccaatttatttgatttctgacctttgtaacacttccaatatagacttaccgacttatgacatggccaccactgaatcttctaaagtcttgccaccaacttttgaagaggcaacatctgtttctgcatctccaagatcttctgtatcttattatcccgatgacatttccatgcaacagttgaatttgtctaggtctacttccctcgcaaatggttacctttctaccttacatccaaaaacaaccgctgtttctgactcttctaacggtgccccaatcagagaccagcaagagcaacaagcacgccccttgaggactgaagattatgcgttgcaaatggggaatgaaaataacgcctatagcaatatggacggtttgctttctcaggatatctttgaacaggagaccgcggccacgttgtttaaaagagacattgtcacaatgaactttaacaataatatattcacaccaagatatagtccgcgcacttttaccaataccgactacaattataatgataatgataataatgataatgatacagaggggcctggtccaataattcatccgggtcctgaaccaccaagatatgacgagatttcttcttga

SEQ ID NO: 11491 - DNA, 2247 bp, Saccharomyces cerevisiae
atgaataggggatcattagatgatgggcctaaactacgtgaagaaaagcacttccaagatttttatcctgatcttaatgccgatactttactgccgttcatcgttcccttagtggaaacaaaggataacagcaccgatactgactcagatgatatttcaaatcggaataacagagagatcgggagtgtcaaaagcgtacaaactaaagaattgattttcaaggggagagtcaccactgaaccactagtactgaagaagaacgaagtggaatttcaaaaatgtaaaataactacgaatgagttaaaaggtaagaaaaatccatactgcgttagatttaatgagagctttatatccaggtactatcatataaacaaagtaagaaataggaagagttataaacaacaacaaaaagaattcgatggtgtggaggcaccctacttcaccaaattctctagtaaagaagccccgaatattactatttcgacgagtacaaagagtgcaattcagaaattcgctagtatttcacccaatcttgttaatttcaagcctcagtatgacatggatgaacaggatgaattatatttgcactaccttaataagaggtattttaaagatcaaatgtctcacgaaatatttgaaattttaatgactacactagaaactgaatggttccatattgaaaaacatataccctcaacgaatagtctgattgctaggcataatattctaagggactgtaagaattatgagctatatggttctgatgatggaacaggtttatcgatggaccaggcgtgtgcagtttgtttaggcacagacagtgacaatctgaatacaattgtcttttgtgatggatgcgatattgctgtgcatcaagaatgttacggtataatttttatcccggaaggaaaatggttatgtagacgatgtatgatctcaaaaaataactttgccacttgtctaatgtgtccaagtcatacaggtgcattcaaacaaacagacaccggttcttgggtacataacatttgtgctctatggcttccagagctatacttttcaaacttacattatatggaacctatagaaggcgttcaaaatgttagcgtatcacgatggaaacttaactgctacatctgtaaaaagaagatgggtgcttgcattcagtgctttcaaagaaactgttttacagcatatcatgtcacgtgtgcccgtcgagctggtctctacatgagtaaagggaaatgcactattcaagaattggcctctaatcaattctcccaaaagtattcagtcgaaagtttctgccacaagcatgcacctagaggatggcaaacgagtatagaaggtattaataaagctagaaaatacttctctctactctctacattacaaaccgaaactcctcagcataatgaagctaatgataggacaaattcaaaattcaacaaaacaatttggaaaacacctaatcaaacgccggtagcaccacatgtttttgctgaaatattgcaaaaggtcgttgatttttttggcttagctaacccaccagcaggcgcatttgatatttgcaaatattggtcaatgaaaagggagcttacaggaggtaccccattaactgcctgttttgaaaataattcattggggtccttaaccgaggaacaagtgcaaacaagaatagattttgccaatgatcagctcgaagacttgtaccggctcaaagagctgactactttggtgaaaaagagaacacaagcttcaaacagcttgtccagatcccgaaagaaggtttttgatatagttaaatcgccccaaaaatatcttttaaaaatcaatgtactggatatctttataaaatctgaacaattcaaggctcttgaaagattggttactgaacctaaattattggttattttagaaaagtgtaaacattgtgattttgatactgtccaaatttttaaggaggaaattatgcatttttttgaggttttggaaactctacccggtgcatcaagaatactccaaactgtctcatcaaaggcaaaagagcaagtaacaaatttaattgggctcatagaacatgtagatattaagaagttgctatccagagattttataataaatgatgacaagatagaagaaagaccatggagtggcccggtgattatggaagaagaaggtttaagcgatgcagaagaactgagtgcaggggaacaccgtatgctgaagctaatccttaacagcggataa

SEQ ID NO: 11492 - DNA, 2247 bp, Artificial Sequence
  Description of Artificial Sequence: Synthetic polynucleotide
atgaataggggatctttagatgatgggcctaaattacgtgaagaaaagcacttccaagatttttatcctgatcttaatgccgatactttattaccgttcatcgttcccttagtggaaacaaaggataacagcaccgatactgacagtgatgatatttctaatagaaataacagagagatcgggagtgtcaaaagcgtacaaactaaagaattgattttcaaggggagagtcaccactgaaccattagtattgaagaagaacgaagtggaatttcaaaaatgtaaaataactacgaatgagttaaaaggtaagaaaaatccatactgcgttagatttaatgagagctttatatccaggtactatcatataaacaaagtaagaaataggaagagttataaacaacaacaaaaagaattcgatggtgtggaggcaccctacttcaccaaattctctagtaaagaagccccgaatattactatttctacgagtacaaagagtgcaattcagaaattcgctagtatttctcccaatcttgttaatttcaagcctcagtatgacatggatgaacaggatgaattatatttgcactaccttaataagaggtattttaaagatcaaatgtctcacgaaatatttgaaattttaatgactacattagaaactgaatggttccatattgaaaaacatatacccagtacgaatagtttgattgctaggcataatattttaagggactgtaagaattatgagttgtatggttctgatgatggaacaggtttatctatggaccaggcgtgtgcagtttgtttaggcacagacagtgacaatttgaatacaattgtcttttgtgatggatgcgatattgctgtgcatcaagaatgttacggtataatttttatcccggaaggaaaatggttatgtagaagatgtatgatctccaaaaataactttgccacttgtttgatgtgtccaagtcatacaggtgcattcaaacaaacagacaccggttcttgggtacataacatttgtgctttatggcttccagagttatacttttccaacttacattatatggaacctatagaaggcgttcaaaatgttagcgtatctcgttggaaacttaactgctacatctgtaaaaagaagatgggtgcttgcattcagtgctttcaaagaaactgttttacagcatatcatgtcacgtgtgcccgtcgtgctggtctctacatgagtaaagggaaatgcactattcaagaattggcctctaatcaattctcccaaaagtattctgtcgaaagtttctgccacaagcatgcacctagaggatggcaaacgagtatagaaggtattaataaagctagaaaatacttctctttactctctacattacaaaccgaaactcctcagcataatgaagctaatgataggacaaattctaaattcaacaaaacaatttggaaaacacctaatcaaacgccggtagcaccacatgtttttgctgaaatattgcaaaaggtcgttgatttttttggcttagctaacccaccagcaggcgcatttgatatttgcaaatattggtctatgaaaagggagcttacaggaggtaccccattaactgcctgttttgaaaataattctttggggtccttaaccgaggaacaagtgcaaacaagaatagattttgccaatgatcagctcgaagacttgtacagactcaaagagttaactactttggtgaaaaagagaacacaagcttctaacagcttgtccagatccagaaagaaggtttttgatatagttaaaagtccccaaaaatatcttttaaaaatcaatgtattggatatctttataaaatctgaacaattcaaggctcttgaaagattggttactgaacctaaattattggttattttagaaaagtgtaaacattgtgattttgatactgtccaaatttttaaggaggaaattatgcatttttttgaggttttggaaactttacccggtgcatctagaatactccaaactgtcagttccaaggcaaaagagcaagtaacaaatttaattgggctcatagaacatgtagatattaagaagttgttatccagagattttataataaatgatgacaagatagaagaaagaccatggagtggcccggtgattatggaagaagaaggtttaagcgatgcagaagaattaagtgcaggggaacaccgtatgttgaagttaatccttaacagcggatga

SEQ ID NO: 11493 - DNA, 3102 bp, Saccharomyces cerevisiae
atgttcggtagcaaacgtctgaaaaatgttaaggaagcatttaagtccctaaaaggccaaaattcagagacacccattgagaactcaaaggcgtcttttaaatccaaaaattcaaagacatctactatttccaaagatgcgaaatcttcctcttctttgaagattcctataagttcaaataacaaaaataaaattttttcactagcagaaaccaacaaatatgggatgagcagtaaaccgatcgcagccgctttcgatttcacccaaaatttattggcaattgctacagtcacaggggaagtccatatttatggccagcaacaagtggaagtggttataaaactggaggatagatctgctataaaagaaatgagatttgtgaaaggtatctatttggtggtcattaacgcaaaagatactgtgtatgttttatcgttatattctcaaaaagtacttacaacagtgtttgttccggggaaaataacatcaattgacacagatgcatccttagactggatgctaatcggccttcaaaatggttcaatgatagtttacgacatagatagggatcaactttcctccttcaaattagacaacctacaaaaaagctcattttttccggctgcaagactatcacctatagtatccattcagtggaaccctagagatattggaactgttttaatatcatatgagtatgtaactctaacatactcattggttgagaacgaaatcaaacaatccttcatatacgaattaccaccttttgctccaggaggcgacttctcagaaaaaaccaatgaaaagagaactcccaaagttattcagtccttatatcaccctaattcactgcacattatcactattcatgaagacaattccttggttttctgggatgctaattcaggccatatgatcatggcaaggacagtgtttgagacagaaatcaatgttccacaacctgattacatacgcgattctagtactaatgctgccaaaatttcgaaagtgtattggatgtgtgaaaacaatccagaatatacttcactactcatctctcataagtcaatcagcagaggagataatcaaagtctcactatgatcgacctcggttacacacctagatattcaataacctcttatgaaggtatgaagaactactatgcaaatccgaaacaaatgaagatatttcccttaccaaccaatgtgccaatagtgaatatactaccaattccaagacagtccccgtattttgcaggatgtcataatccggggttaattttgttaatcctaggtaacggtgagatagaaacaatgctatatccttctggaatatttacagataaagcctctttattccctcaaaatctttcctggctgagaccattagccacgacttcaatggccgcttctgtaccaaacaaattatggcttggtgcgctttctgcagctcaaaacaaggattatttgttgaagggaggggttagaacaaaaaggcaaaaacttcccgctgagtacggtacagcattcattaccggccattctaatggctcagttaggatatacgatgcttcccatggggatatacaagataatgctagctttgaagtgaatctatcaagaacgttgaacaaggccaaagaactagcagttgataagatatcttttgccgcagagactctcgagttggcggtgtcaattgaaacaggagacgttgttttattcaaatatgaagtaaaccagttttacagtgttgagaacagaccagaaagcggtgacctggagatgaatttcaggcggttttctttgaataatacgaatggtgttctcgtcgatgtgagagacagggcacctaccggtgttaggcagggatttatgccatcaactgccgtgcatgccaacaaagggaaaacatctgcaatcaacaacagtaatattggatttgttggaatcgcatatgctgccggaagccttatgttgatcgatagaagaggtcctgcaatcatttacatggaaaacattagagaaatctcgggagctcaaagcgcatgtgttacctgcatcgaattcgtaattatggagtatggagacgatggttactctagtatattgatggtctgtggtactgatatgggcgaggtaatcacatacaaaattcttcctgcatcaggtggaaagttcgatgtgcaactaatggatattactaatgttaccagtaagggtccgatacacaaaattgatgcattttcaaaggaaacaaaatctagctgcttggcaactattccaaaaatgcagaatttaagtaaaggcctttgcattcctggtattgtattaataactggattcgatgatatcagattaataacactgggcaaatctaaaagtacacataaaggtttcaaatacccgcttgccgcgacaggtttatcttacatctcaaccgttgagaaaaataatgataggaagaacctaaccgtaataattacattagaaatcaatggccatctaagagtttttactattccagatttcaaagaacaaatgtctgaacatattccatttccaattgccgcaaaatacattacagaatcatctgttttaagaaatggtgatatagcgattcgagtgagtgaatttcaggcgtcactattttctactgtcaaggaacaggatacgctagcgccagtttctgacacactgtacatcaatggaatcaggattccctataggccacaagtaaattcattacagtgggcaagaggcactgtatattgtactcccgctcaattaaatgaattattgggtggcgtgaatagacctgcatccaaatacaaagagagcatcattgctgagggaagtttctcggagcgttcttcagacgataataatgcgaaccatccggaacaccagtataccaagcccacccgtaagggcaggaacagtagttacggggtactaagaaatgtttctcgagctgtagaaactagatgggacgccgttgaagatagattcaacgactatgctaccgccatgggagaaacaatgaacgaggctgttgagcagactggaaaagatgtaatgaaaggtgcccttggtttttaa

SEQ ID NO: 11494 - DNA, 3102 bp, Artificial Sequence
  Description of Artificial Sequence: Synthetic polynucleotide
atgttcggtagcaaacgtttgaaaaatgttaaggaagcatttaagtccttgaaaggccaaaattctgagacacccattgagaactccaaggcgtcttttaaatccaaaaattctaagacatctactatttccaaagatgcgaaatcttcctcttctttgaagattcctataagtagtaataacaaaaataaaattttttctttggcagaaaccaacaaatatgggatgagcagtaaaccgatcgcagccgctttcgatttcacccaaaatttattggcaattgctacagtcacaggggaagtccatatttatggccagcaacaagtggaagtggttataaaattagaggatagatctgctataaaagaaatgagatttgtgaaaggtatctatttggtggtcattaacgcaaaagatactgtgtatgttttatctttatattctcaaaaagtacttacaacagtgtttgttccggggaaaataacatccattgacacagatgcatccttagactggatgttgatcggccttcaaaatggttctatgatagtttacgacatagatagggatcaactttcctccttcaaattagacaacttacaaaaaagctccttttttccggctgcaagattatctcctatagtatccattcagtggaaccctagagatattggaactgttttaatatcttatgagtatgtaactttgacatactctttggttgagaacgaaatcaaacaatccttcatatacgaattaccaccttttgctccaggaggcgacttctctgaaaaaaccaatgaaaagagaactcccaaagttattcagtccttatatcaccctaattctttacacattatcactattcatgaagacaattccttggttttctgggatgctaatagtggccatatgatcatggcaaggacagtgtttgagacagaaatcaatgttccacaacctgattacatacgcgattctagtactaatgctgccaaaatttccaaagtgtattggatgtgtgaaaacaatccagaatatacttctttactcatctctcataagtctatcagcagaggagataatcaaagtctcactatgatcgacctcggttacacacctagatattctataacctcttatgaaggtatgaagaactactatgcaaatccgaaacaaatgaagatatttcccttaccaaccaatgtgccaatagtgaatatattgccaattccaagacagtccccgtattttgcaggatgtcataatccggggttaattttgttaatcttgggtaacggtgagatagaaacaatgctttatccttctggaatatttacagataaagcctctttattccctcaaaatctttcctggttgagaccattagccacgacttctatggccgcttctgtaccaaacaaattatggcttggtgcgctttctgcagctcaaaacaaggattatttgttgaagggaggggttagaacaaaaaggcaaaaacttcccgctgagtacggtacagcattcattaccggccattctaatggctctgttaggatatacgatgcttcccatggggatatacaagataatgctagctttgaagtgaatttatctagaacgttgaacaaggccaaagaattggcagttgataagatatcttttgccgcagagactctcgagttggcggtgtccattgaaacaggagacgttgttttattcaaatatgaagtaaaccagttttacagtgttgagaacagaccagaaagcggtgacttggagatgaatttcaggaggttttctttgaataatacgaatggtgttctcgtcgatgtgagagacagggcacctaccggtgttaggcagggatttatgccatctactgccgtgcatgccaacaaagggaaaacatctgcaatcaacaacagtaatattggatttgttggaatcgcatatgctgccggaagccttatgttgatcgatagaagaggtcctgcaatcatttacatggaaaacattagagaaatcagtggagctcaaagcgcatgtgttacctgcatcgaattcgtaattatggagtatggagacgatggttactctagtatattgatggtctgtggtactgatatgggcgaggtaatcacatacaaaattcttcctgcatctggtggaaagttcgatgtgcaattgatggatattactaatgttaccagtaagggtccgatacacaaaattgatgcattttccaaggaaacaaaatctagctgcttggcaactattccaaaaatgcagaatttaagtaaaggcctttgcattcctggtattgtattaataactggattcgatgatatcagattaataacattaggcaaatctaaaagtacacataaaggtttcaaatacccgcttgccgcgacaggtttatcttacatctccaccgttgagaaaaataatgataggaagaacttgaccgtaataattacattagaaatcaatggccatttaagagtttttactattccagatttcaaagaacaaatgtctgaacatattccatttccaattgccgcaaaatacattacagaaagctctgttttaagaaatggtgatatagcgattagagtgagtgaatttcaggcgtctttattttctactgtcaaggaacaggatacgttggcgccagtttctgacacattgtacatcaatggaatcaggattccctataggccacaagtaaattctttacagtgggcaagaggcactgtatattgtactcccgctcaattaaatgaattattgggtggcgtgaatagacctgcatccaaatacaaagagagcatcattgctgagggaagtttcagtgagcgttcttctgacgataataatgcgaaccatccggaacaccagtataccaagcccacccgtaagggcaggaacagtagttacggggtattaagaaatgtttctagagctgtagaaactagatgggacgccgttgaagatagattcaacgactatgctaccgccatgggagaaacaatgaacgaggctgttgagcagactggaaaagatgtaatgaaaggtgcccttggtttttga

SEQ ID NO: 11495 - DNA, 1641 bp, Saccharomyces cerevisiae
atgcttagtagatcactaaataaagtagtcacatctataaagtcgtcttcgataatcaggatgtcatccgctaccgctgctgctacttctgctcctactgctaatgctgctaatgctctaaaagcttcaaaggctccaaagaaaggtaaactacaagtgtctttgaaaacacctaagggtacgaaggattgggctgatagtgatatggttatcagagaagccatttttagcactttatctggcctattcaagaagcatggtggtgtcactatcgacacacctgttttcgagttaagagaaattttagcaggcaagtatggtgaggactccaaactgatctacaacttggaggaccagggtggtgaattatgttctttacgttacgatttgaccgttccttttgccaggtacgttgccatgaacaatattcagagtatcaagaggtatcacattgcaaaagtctacagaagagaccaaccagccatgactaagggtcgtatgagagaattttaccagtgtgattttgacgttgcaggcacattcgaatctatggttcctgattccgaatgtttgtccattttagtggaaggtttgaccagtttgggaatcaaagatttcaaaatcaaattgaatcacaggaagattcttgatgggatcttccaaatcgctggtgttaaagatgaggatgtgaggaaaatctcttctgctgtcgataagttggacaaatctccatgggaagcagtcaagaaggaaatgaccgaagaaaaaggtcaatccgaagaaactgctgataaaatcggtgagtatgttaaattaaatggttctttgaaggaaattcacgctgttctatccgcagatgccaacattacttcaaacgaaaaggctaaacaaggtttggatgatattgctactttgatgaagtataccgaagcatttgacattgactcattcatctcttttgatctttctcttgcaagaggtttggattactatacaggtttgatctatgaagttgttacttctgcatctgctccaccagagaatgcttcagaattgaagaagaaggccaaatctgcagaagacgcgtcagaattcgttggtgtcggctctattgcagccggtggtcgatatgataatttggtcaacatgttctctgaagcttccggcaaaaaatctactcaaattccatgtgttggtatttcatttggtgttgaaagaatattttctttgatcaaacaaagaattaattcctctacaactataaagccaacggctacacaggtgttcgttatggcttttggtggtggtaaggactggactggttatttacccgaaagaatgaaggttactaagcaattatgggatgctggcattgaagctgaatatgtctataaggccaaggctaatcctaggaagcaattcgatgctgctgaaaaagcgggttgtcacattgccgtaatcctcggtaaggaggagtacttagaaggtaaattacgtgtcaaaagattgggccaagaatttgccgatgatgatggtgaattggttagtgcggctgacattgttcctattgttcaagaaaagttatcacaaattcatgaagatggtctaaatgaggtcactcgtttaattaaaggattataa

SEQ ID NO: 11496 - DNA, 1641 bp, Artificial Sequence
  Description of Artificial Sequence: Synthetic polynucleotide
atgcttagtagatccttgaataaagtagtcacatctataaagtcttcttctataatcaggatgtcttccgctaccgctgctgctacttctgctcctactgctaatgctgctaatgctttgaaagcttccaaggctccaaagaaaggtaaattacaagtgtctttgaaaacacctaagggtacgaaggattgggctgatagtgatatggttatcagagaagccatttttagcactttatctggccttttcaagaagcatggtggtgtcactatcgacacacctgttttcgagttaagagaaattttagcaggcaagtatggtgaggactccaaattaatctacaacttggaggaccagggtggtgaattatgttctttacgttacgatttgaccgttccttttgccaggtacgttgccatgaacaatattcagagtatcaagaggtatcacattgcaaaagtctacagaagagaccaaccagccatgactaagggtcgtatgagagaattttaccagtgtgattttgacgttgcaggcacattcgaatctatggttcctgattccgaatgtttgtccattttagtggaaggtttgaccagtttgggaatcaaagatttcaaaatcaaattgaatcacaggaagattcttgatgggatcttccaaatcgctggtgttaaagatgaggatgtgaggaaaatctcttctgctgtcgataagttggacaaatctccatgggaagcagtcaagaaggaaatgaccgaagaaaaaggtcaatccgaagaaactgctgataaaatcggtgagtatgttaaattaaatggttctttgaaggaaattcacgctgttttatccgcagatgccaacattacttctaacgaaaaggctaaacaaggtttggatgatattgctactttgatgaagtataccgaagcatttgacattgactctttcatctcttttgatctttctcttgcaagaggtttggattactatacaggtttgatctatgaagttgttacttctgcatctgctccaccagagaatgcttctgaattgaagaagaaggccaaatctgcagaagacgcgtctgaattcgttggtgtcggctctattgcagccggtggtagatatgataatttggtcaacatgttctctgaagcttccggcaaaaaatctactcaaattccatgtgttggtatttcctttggtgttgaaagaatattttctttgatcaaacaaagaattaattcctctacaactataaagccaacggctacacaggtgttcgttatggcttttggtggtggtaaggactggactggttatttacccgaaagaatgaaggttactaagcaattatgggatgctggcattgaagctgaatatgtctataaggccaaggctaatcctaggaagcaattcgatgctgctgaaaaagcgggttgtcacattgccgtaatcctcggtaaggaggagtacttagaaggtaaattacgtgtcaaaagattgggccaagaatttgccgatgatgatggtgaattggttagtgcggctgacattgttcctattgttcaagaaaagttatctcaaattcatgaagatggtttgaatgaggtcactcgtttaattaaaggattatga

SEQ ID NO: 11497 - DNA, 1434 bp, Saccharomyces cerevisiae
atgacattgaataggaagtgcgtagtgatacataacggatcgcacagaacggtggctggatttagtaacgttgaattgccacaatgcattataccctctagctatattaaaagaacagatgaggggggggaagctgagtttatattcggaacctacaatatgatagacgctgcggcagaaaaacgcaatggtgacgaggtgtatacattggtagatagccaagggttaccgtacaattgggacgcattggagatgcagtggagatatctgtacgacacccaattgaaagtttcacccgaggaactgccactggtgattacgatgcctgccaccaatggtaaaccggacatggccatattagagcgctactatgagctggcgttcgacaaattaaatgtaccagtattccagattgtaatcgagccattggcaattgccctatccatgggcaagagttctgcattcgtgattgatatcggcgcgtcaggctgtaacgttactcccatcattgacggtattgtggtgaagaatgctgtagtgagatctaaatttggcggtgatttcttggattttcaagtacacgaaaggttggctccactgattaaagaagagaacgacatggaaaacatggccgacgagcaaaaaaggtccaccgacgtttggtacgaagcaagcacgtggattcagcaattcaagtctactatgttgcaagtaagcgaaaaggacttgtttgagttggaaaggtattacaaagagcaagcagatatatacgctaagcaacaggagcagttaaaacaaatggatcagcaacttcagtacacggcgttaacgggaagccccaacaatccgttggttcaaaagaaaaattttctattcaagccattaaacaagactttaaccttggaccttaaggagtgctaccaattcgcagagtatctcttcaaacctcaactgatatcagacaaattctcaccagaggacggactgggaccgctaatggcaaaatcagtcaagaaggccggcgctagtataaattcaatgaaggccaatacctccaccaacccaaacggattgggtacaagccatataaacaccaatgttggcgataataacagtactgccagcagcagcaacatatcaccagaacaagtatactcgctactgttgacgaacgtcatcatcacaggatctacctctctgatcgaaggtatggagcaacgcataataaaggagctgtcaatcaggttcccgcaatacaaattgacaacttttgccaaccaagtcatgatggaccgtaaaatccagggatggctgggcgcccttacaatggccaatctgccatcatggagcttgggaaaatggtactctaaggaagattacgaaacgctgaaaagagacagaaagcagtcgcaggctacgaacgcaacaaactag

SEQ ID NO: 11498 - DNA, 1434 bp, Artificial Sequence
  Description of Artificial Sequence: Synthetic polynucleotide
atgacattgaataggaagtgcgtagtgatacataacggatctcacagaacggtggctggatttagtaacgttgaattgccacaatgcattataccctctagctatattaaaagaacagatgaggggggggaagctgagtttatattcggaacctacaatatgatagacgctgcggcagaaaaacgcaatggtgacgaggtgtatacattggtagatagccaagggttaccgtacaattgggacgcattggagatgcagtggagatatttgtacgacacccaattgaaagtttctcccgaggaattaccattggtgattacgatgcctgccaccaatggtaaaccggacatggccatattagagcgctactatgagttagcgttcgacaaattaaatgtaccagtattccagattgtaatcgagccattggcaattgccctttccatgggcaagagttctgcattcgtgattgatatcggcgcgtctggctgtaacgttactcccatcattgacggtattgtggtgaagaatgctgtagtgagatctaaatttggcggtgatttcttggattttcaagtacacgaaaggttggctccattgattaaagaagagaacgacatggaaaacatggccgacgagcaaaaaaggtccaccgacgtttggtacgaagcaagcacgtggattcagcaattcaagtctactatgttgcaagtaagcgaaaaggacttgtttgagttggaaaggtattacaaagagcaagcagatatatacgctaagcaacaggagcagttaaaacaaatggatcagcaacttcagtacacggcgttaacgggaagccccaacaatccgttggttcaaaagaaaaattttcttttcaagccattaaacaagactttaaccttggaccttaaggagtgctaccaattcgcagagtatctcttcaaacctcaattgatatctgacaaattctctccagaggacggacttggaccgttaatggcaaaatctgtcaagaaggccggcgctagtataaattctatgaaggccaatacctccaccaacccaaacggattgggtacaagccatataaacaccaatgttggcgataataacagtactgccagcagcagcaacatatctccagaacaagtatactctttattattgacgaacgtcatcatcacaggatctacctctttgatcgaaggtatggagcaacgcataataaaggagttatctatcaggttcccgcaatacaaattgacaacttttgccaaccaagtcatgatggaccgtaaaatccagggatggttaggcgcccttacaatggccaatttaccatcttggagcttgggaaaatggtactctaaggaagattacgaaacgttgaaaagagacagaaagcagtctcaggctacgaacgcaacaaactga

SEQ ID NO: 11499 - DNA, 1113 bp, Saccharomyces cerevisiae
atggctgaagcaagcatcgaaaagactcaaattttacaaaaatatctagaactggaccaaagaggtagaataattgccgaatacgtttggatcgatggtactggtaacttacgttccaaaggtagaactttgaagaagagaatcacatccattgaccaattgccagaatggaacttcgacggttcttctaccaaccaagcgccaggccacgactctgacatctatttgaaacccgttgcttactacccagatcccttcaggagaggtgacaacattgttgtcttggccgcatgttacaacaatgacggtactccaaacaagttcaaccacagacacgaagctgccaagctatttgctgctcataaggatgaagaaatctggtttggtctagaacaagaatacactctatttgacatgtatgacgatgtttacggatggccaaagggtgggtacccagctccacaaggtccttactactgtggtgttggtgccggtaaggtttatgccagagacatgatcgaagctcactacagagcttgtttgtatgccggattagaaatttctggtattaacgctgaagtcatgccatctcaatgggaattccaagtcggtccatgtaccggtattgacatgggtgaccaattatggatggccagatactttttgcacagagtggcagaagagtttggtatcaagatctcattccatccaaagccattgaagggtgactggaacggtgccggttgtcacactaacgtttccaccaaggaaatgagacaaccaggtggtatgaaatacatcgaacaagccatcgagaagttatccaagagacacgctgaacacattaagttgtacggtagcgataacgacatgagattaactggtagacatgaaaccgcttccatgactgccttttcttctggtgtcgccaacagaggtagctcaattagaatcccaagatccgtcgccaaggaaggttacggttactttgaagaccgtagaccagcttccaacatcgacccatacttggttacaggtatcatgtgtgaaactgtttgcggtgctattgacaatgctgacatgacgaaggaatttgaaagagaatcttcataa

SEQ ID NO: 11500 - DNA, 1113 bp, Artificial Sequence
  Description of Artificial Sequence: Synthetic polynucleotide
atggctgaagcaagcatcgaaaagactcaaattttacaaaaatatttggaattagaccaaagaggtagaataattgccgaatacgtttggatcgatggtactggtaacttacgttccaaaggtagaactttgaagaagagaatcacatccattgaccaattgccagaatggaacttcgacggttcttctaccaaccaagcgccaggccacgactctgacatctatttgaaacccgttgcttactacccagatcccttcaggagaggtgacaacattgttgtcttggccgcatgttacaacaatgacggtactccaaacaagttcaaccacagacacgaagctgccaagttatttgctgctcataaggatgaagaaatctggtttggtttggaacaagaatacactttatttgacatgtatgacgatgtttacggatggccaaagggtgggtacccagctccacaaggtccttactactgtggtgttggtgccggtaaggtttatgccagagacatgatcgaagctcactacagagcttgtttgtatgccggattagaaatttctggtattaacgctgaagtcatgccatctcaatgggaattccaagtcggtccatgtaccggtattgacatgggtgaccaattatggatggccagatactttttgcacagagtggcagaagagtttggtatcaagatctctttccatccaaagccattgaagggtgactggaacggtgccggttgtcacactaacgtttccaccaaggaaatgagacaaccaggtggtatgaaatacatcgaacaagccatcgagaagttatccaagagacacgctgaacacattaagttgtacggtagcgataacgacatgagattaactggtagacatgaaaccgcttccatgactgccttttcttctggtgtcgccaacagaggtagctctattagaatcccaagatccgtcgccaaggaaggttacggttactttgaagaccgtagaccagcttccaacatcgacccatacttggttacaggtatcatgtgtgaaactgtttgcggtgctattgacaatgctgacatgacgaaggaatttgaaagagaatcttcttga

SEQ ID NO: 11501 - DNA, 1437 bp, Saccharomyces cerevisiae
atgggcgcaaccaaaattttaatggacagtactcatttcaatgagatccgtagtataatccgttcgaggtcagtggcatgggacgccttagccagatctgaggaattgagcgaaattgatgcgtctactgcaaaagcgttagaatccattctggtgaagaagaacattggtgacggtttatcatcttcgaacaatgcacattccgggttcaaagtgaatggcaagacgttgataccattaattcacttactttccacctcagacaacgaagactgcaaaaaatctgtgcagaacctaatagctgaattgttatcgtctgacaagtatggagacgataccgtgaagtttttccaagaagaccccaagcaattggaacaattatttgatgtgtcactcaagggagacttccagactgtgctaatctctgggttcaacgtggtctcactcttagtgcaaaatgggttgcacaatgtgaaactagtggaaaagctgttgaaaaacaacaacttgatcaatatcttgcaaaacattgagcagatggacacttgttacgtgtgcatcagactattgcaagaactggccgtgataccagagtatcgtgacgtgatatggttgcatgagaagaagttcatgcccaccttattcaagatcctgcaacgtgccacggactctcaattggccacgcggatagttgcaacaaactccaaccacctgggtattcaattgcagtaccactctttactattgatatggttgctgacctttaacccagtttttgcaaacgagctagtccagaaatacttgagtgatttcttggacctcttgaaattggttaagataaccataaaggagaaagtgtccagattgtgcatatccatcatcctgcaatgttgctccacgcgcgtcaagcagcacaagaaggtgattaagcaacttttgttgctcggcaacgcgttgcccaccgtacagagcttgagcgaaagaaagtattccgacgaagaattgcgtcaagacatcagcaacctcaaggaaatcctagaaaacgagtaccaagaattgacctccttcgatgaatacgtcgccgaattggactccaagttgctgtgctggtctccaccacatgtcgacaacggtttctggtccgataacattgacgagttcaagaaggacaactacaagatctttagacaattgatcgaactcttgcaagcaaaggtccgtaacggcgacgtcaacgcgaaacaagaaaagatcattatccaagtcgccttgaacgacatcactcacgtggtcgagcttctaccagagagcatcgacgttctcgacaagactggcggcaaagccgacatcatggagttgctgaaccattcagattctagggtgaaatacgaggccctcaaggccacgcaggcaatcattggatataccttcaaataa

SEQ ID NO: 11502 - DNA, 1437 bp, Artificial Sequence
  Description of Artificial Sequence: Synthetic polynucleotide
atgggcgcaaccaaaattttaatggacagtactcatttcaatgagatccgtagtataatccgttctaggtctgtggcatgggacgccttagccagatctgaggaattgagcgaaattgatgcgtctactgcaaaagcgttagaatccattttggtgaagaagaacattggtgacggtttatcttcttccaacaatgcacattccgggttcaaagtgaatggcaagacgttgataccattaattcacttactttccaccagtgacaacgaagactgcaaaaaatctgtgcagaacttgatagctgaattgttatcttctgacaagtatggagacgataccgtgaagtttttccaagaagaccccaagcaattggaacaattatttgatgtgagtctcaagggagacttccagactgtgttaatctctgggttcaacgtggtctctctcttagtgcaaaatgggttgcacaatgtgaaattagtggaaaagttgttgaaaaacaacaacttgatcaatatcttgcaaaacattgagcagatggacacttgttacgtgtgcatcagattattgcaagaattggccgtgataccagagtatcgtgacgtgatatggttgcatgagaagaagttcatgcccaccttattcaagatcttgcaacgtgccacggactctcaattggccacgagaatagttgcaacaaactccaaccacttgggtattcaattgcagtaccactctttattattgatatggttgttgacctttaacccagtttttgcaaacgagttggtccagaaatacttgagtgatttcttggacctcttgaaattggttaagataaccataaaggagaaagtgtccagattgtgcatatccatcatcttgcaatgttgctccacgcgcgtcaagcagcacaagaaggtgattaagcaacttttgttgctcggcaacgcgttgcccaccgtacagagcttgagcgaaagaaagtattccgacgaagaattgcgtcaagacatcagcaacctcaaggaaatcttggaaaacgagtaccaagaattgacctccttcgatgaatacgtcgccgaattggactccaagttgctttgctggtctccaccacatgtcgacaacggtttctggtccgataacattgacgagttcaagaaggacaactacaagatctttagacaattgatcgaactcttgcaagcaaaggtccgtaacggcgacgtcaacgcgaaacaagaaaagatcattatccaagtcgccttgaacgacatcactcacgtggtcgagcttttaccagagagcatcgacgttctcgacaagactggcggcaaagccgacatcatggagttgttgaaccattctgattctagggtgaaatacgaggccctcaaggccacgcaggcaatcattggatataccttcaaatga

SEQ ID NO: 11503 - DNA, 204 bp, Saccharomyces cerevisiae
atggtcgcctttttagaactaacttctgacgtttctcaaccttttgtcatcccatctctttcgccagtctctcagccaagctcaagaaagaactctgacgcaaacgtcgatgacctgaatctggctattgccaatgccgctcttttggatgcctctgcttcaagccgctcacactccagaaaaaactctttgtctctgttgtaa

SEQ ID NO: 11504 - DNA, 204 bp, Artificial Sequence
  Description of Artificial Sequence: Synthetic polynucleotide
atggtcgcctttttagaattgacttctgacgtttctcaaccttttgtcatcccatctctttctccagtctctcagccaagcagcagaaagaactctgacgcaaacgtcgatgacttgaatttggctattgccaatgccgctcttttggatgcctctgcttctagccgctcccactccagaaaaaactctttgtctttgttgtga

SEQ ID NO: 11505 - DNA, 591 bp, Saccharomyces cerevisiae
atgaaacagatagtcaaaagaagccatgccatcagaatagttgcagcattaggaatcataggcctgtggatgtttttctcgtctaatgaactatccatcgctacgccgggcctaatcaaggcgaagtctggtatagatgaagtgcaaggggcggctgctgagaagaacgacgctcggttgaaagagatcgagaagcaaaccattatgccattgatgggcgatgacaaggtgaagaaggaagtgggcagggcgtcgtggaagtacttccataccctgctggcccgttttccggacgagcctactcctgaagaaagagagaaactgcacacgtttattgggttgtatgcagaactctatccatgcggggaatgttcatatcactttgtaaagttgattgagaagtatcccgtacagacatctagcaggacggctgccgcaatgtggggatgccacattcacaacaaggtgaacgaatacctaaagaaagacatatatgactgtgctaccatcctggaggactacgattgtggatgtagtgacagcgacggtaaacgcgtgtctctcgagaaggaggctaaacagcacggttga

SEQ ID NO: 11506 - DNA, 591 bp, Artificial Sequence
  Description of Artificial Sequence: Synthetic polynucleotide
atgaaacagatagtcaaaagaagccatgccatcagaatagttgcagcattaggaatcataggcttatggatgtttttcagttctaatgaattatccatcgctacgccgggcttaatcaaggcgaagtctggtatagatgaagtgcaaggggcggctgctgagaagaacgacgctagattgaaagagatcgagaagcaaaccattatgccattgatgggcgatgacaaggtgaagaaggaagtgggcagggcgtcttggaagtacttccataccttattagcccgttttccggacgagcctactcctgaagaaagagagaaattacacacgtttattgggttgtatgcagaactctatccatgcggggaatgttcttatcactttgtaaagttgattgagaagtatcccgtacagacatctagcaggacggctgccgcaatgtggggatgccacattcacaacaaggtgaacgaatacttgaagaaagacatatatgactgtgctaccatcttggaggactacgattgtggatgtagtgacagcgacggtaaacgcgtgtctctcgagaaggaggctaaacagcacggttga

SEQ ID NO: 11507 - DNA, 360 bp, Saccharomyces cerevisiae
atggtttgcttctcgatctctttcaaccgagcgtcgttcttctcagcagccgccccttgcacttcatctataccagacttcgccttgattaggcccggcgtagcgatggatagttcattagacgagaaaaacatccacaggcctatgattcctaatgctgcaactattctgatggcatggcttcttttgactatctgtttcatcccttcgttccttgcacaatctgtccagactttcctctttacaaatcaccagccttcccgtcttcttgtcttcatcacccacgtttattgtttaatgataaagccttttgtcctttatttttggttccttttcccgcttcgtttacccggtggttaa

SEQ ID NO: 11508 - DNA, 360 bp, Artificial Sequence
  Description of Artificial Sequence: Synthetic polynucleotide
atggtttgcttctccatctctttcaacagggcgtctttcttcagtgcagccgccccttgcacttcttctataccagacttcgccttgattaggcccggcgtagcgatggatagttctttagacgagaaaaacatccacaggcctatgattcctaatgctgcaactattttgatggcatggcttcttttgactatctgtttcatcccttctttccttgcacaatctgtccagactttcctctttacaaatcaccagccttcccgtcttcttgtcttcatcacccacgtttattgtttaatgataaagccttttgtcctttatttttggttccttttcccgcttcgtttacccggtggttga

SEQ ID NO: 11509 - DNA, 1071 bp, Saccharomyces cerevisiae
atgtccaaaagaaacactccaccgctcagatcatcagggataaacactattcaaataaatgctgctagagaaatgcacgctcaaacggtgcgcgctcgaagaatgcccatgccaactagcggcatcactacaccctctgtgcaaccaactgcagccccagcaacaccacctcgacatatttgcaataacccaaacaatccgcagtgtctccactgtgggtctgttatcattccatctccaagggccacgttacccttggaggacaacccctccatctccatcaacgactggaccatctcctccagaaagaagcccattttgaactcgcaggaattagacatctgggaaaacgaaaaactcaaaggtttgactttgccagagatgatttttggtaacaactacatcaggatcgaaaattcaaaacagcattggtccatagagttcaatgccctggatgctttaaaggaggttcaactccaggattcaggtattcgtgttgcgtactcaaacgactggataaattctaaaaaaagacaaaattcaactaatggtgcgcaacggttcactaacgatgtgaacgacgattccttaaatatcatacacaagtacgactggacctacactacgcggtataagggcacagagagctcacctgagtcgaaattccgactggataacgatcaaaagctgccccttgacaaactggccgtacacgataaaatcctattctatgacgacatgattcttttcgaagacgaattggcagacaatggcatatcaatccttaacgtcaaaataagagttatgaacgaaaggttactgctgctgagccggttctttttaagggtggacgatgttctggtgagggtctacgacaccaggatttacgtggagtttgacgaaaacgtagtgatcagagaatccaaggaatttgaaggtaaatatcaggatgtacttgctaagcaccggctatcccaatctcacgacccaaaagctgccttgagagatagtaattgggtagcacagaacacgccgatgatcaaaagacaatgtgaaataattcagttctaa

SEQ ID NO: 11510 - DNA, 1071 bp, Artificial Sequence
  Description of Artificial Sequence: Synthetic polynucleotide
atgtccaaaagaaacactccaccgctcagaagttccgggataaacactattcaaataaatgctgctagagaaatgcacgctcaaacggtgcgcgctagaagaatgcccatgccaactagcggcatcactacaccctctgtgcaaccaactgcagccccagcaacaccacctagacatatttgcaataacccaaacaatccgcagtgtctccactgtgggtctgttatcattccatctccaagggccacgttacccttggaggacaacccctccatctccatcaacgactggaccatctcctccagaaagaagcccattttgaactctcaggaattagacatctgggaaaacgaaaaactcaaaggtttgactttgccagagatgatttttggtaacaactacatcaggatcgaaaattctaaacagcattggtccatagagttcaatgccttggatgctttaaaggaggttcaactccaggattctggtattcgtgttgcgtactctaacgactggataaattctaaaaaaagacaaaattctactaatggtgcgcaaagattcactaacgatgtgaacgacgattccttaaatatcatacacaagtacgactggacctacactacgagatataagggcacagagagctctcctgagagtaaattcagattagataacgatcaaaagttgccccttgacaaattggccgtacacgataaaatcttattctatgacgacatgattcttttcgaagacgaattggcagacaatggcatatccatccttaacgtcaaaataagagttatgaacgaaaggttattattattaagcaggttctttttaagggtggacgatgttttggtgagggtctacgacaccaggatttacgtggagtttgacgaaaacgtagtgatcagagaatccaaggaatttgaaggtaaatatcaggatgtacttgctaagcaccgtctttcccaatctcacgacccaaaagctgccttgagagatagtaattgggtagcacagaacacgccgatgatcaaaagacaatgtgaaataattcagttctga

SEQ ID NO: 11511 - DNA, 1218 bp, Saccharomyces cerevisiae
atgtctattaatatttgtagagataatcatgatccattttaccgttacaaaatgcctcccatccaagccaaggtggaaggtagaggtaacggtatcaagactgccgttttgaacgtcgctgacatctctcacgcgctaaatagacctgctccatatattgtcaagtattttggtttcgaattaggtgctcaaacttccatctctgttgacaaagatcgttatttagttaatggtgttcacgaacctgccaaattgcaagacgtattggatggctttattaacaagtttgttctctgtggaagctgtaaaaatccagaaacggagatcatcattaccaaagataatgatttggttcgagactgtaaagcctgtggtaagagaactccaatggacttgagacataaactatcatccttcattttgaaaaacccacctgactccgtttctggttccaagaagaagaagaaagcagctaccgcttcggccaatgttcgtggtggtgggttgtccattagtgatattgctcaaggtaagtctcagaatgcaccttcagatggcaccggctcatccactccacaacatcatgacgaagacgaagatgaattatctcgtcaaatcaaggcggctgcctctaccttagaagatatcgaggtcaaagatgacgaatgggcggttgatatgtctgaagaagccattagagctcgtgccaaggaactagaagtgaactctgagctcactcaactggatgaatatggtgaatggattttggagcaggctggtgaagataaggagaacttaccatcagatgtggagctttataagaaggctgcagaactagacgtcttgaatgatccaaaaattggttgtgtcttggcgcaatgtctattcgatgaggatatcgtaaacgaaatcgctgaacataatgcatttttcactaaaattttagtcactccagaatacgaaaagaactttatgggtggtattgaaagatttttaggtttagaacataaggatctaatcccactattaccaaaaattttggtacaactatacaataatgatatcatctcggaagaagaaatcatgagatttggtaccaaatcatccaagaaatttgtacctaaggaggtatccaaaaaggttcgtagggctgctaagccattcattacgtggttagaaaccgctgaaagtgacgatgatgaagaagacgacgaatag

SEQ ID NO: 11512 - DNA, 1218 bp, Artificial Sequence
  Description of Artificial Sequence: Synthetic polynucleotide
atgtctattaatatttgtagagataatcatgatccattttaccgttacaaaatgcctcccatccaagccaaggtggaaggtagaggtaacggtatcaagactgccgttttgaacgtcgctgacatctctcacgcgttgaatagacctgctccatatattgtcaagtattttggtttcgaattaggtgctcaaacttccatctctgttgacaaagatcgttatttagttaatggtgttcacgaacctgccaaattgcaagacgtattggatggctttattaacaagtttgttctctgtggaagctgtaaaaatccagaaacggagatcatcattaccaaagataatgatttggttagagactgtaaagcctgtggtaagagaactccaatggacttgagacataaattatcttccttcattttgaaaaacccacctgactccgtttctggttccaagaagaagaagaaagcagctaccgcttctgccaatgttcgtggtggtgggttgtccattagtgatattgctcaaggtaagtctcagaatgcaccttctgatggcaccggcagctccactccacaacatcatgacgaagacgaagatgaattatctcgtcaaatcaaggcggctgcctctaccttagaagatatcgaggtcaaagatgacgaatgggcggttgatatgtctgaagaagccattagagctcgtgccaaggaattggaagtgaactctgagctcactcaattggatgaatatggtgaatggattttggagcaggctggtgaagataaggagaacttaccaagtgatgtggagctttataagaaggctgcagaattagacgtcttgaatgatccaaaaattggttgtgtcttggcgcaatgtttgttcgatgaggatatcgtaaacgaaatcgctgaacataatgcatttttcactaaaattttagtcactccagaatacgaaaagaactttatgggtggtattgaaagatttttaggtttagaacataaggatttgatcccattattaccaaaaattttggtacaattgtacaataatgatatcatcagtgaagaagaaatcatgagatttggtaccaaatcttccaagaaatttgtacctaaggaggtatccaaaaaggttcgtagggctgctaagccattcattacgtggttagaaaccgctgaaagtgacgatgatgaagaagacgacgaatga

SEQ ID NO: 11513 - DNA, 3228 bp, Saccharomyces cerevisiae
atggacaacaaaagactgtataacggtaacctatccaacattcctgaggttatagatcctggaattacaattccaatttatgaagaggatattagaaatgatacacgcatgaatacaaatgctcgttctgtgagagtctctgacaagagaggtcgttctagctccacttccccacagaaaattggctcctatcgtactcgtgcgggcaggttttcagatactctaaccaatctactcccttcgattagcgctaagctacaccattcaaagaagagtacccctgtagttgttgtgcctcctacgagcagtactccagacagtttaaattccacgacatacgctcccagagtgtctagcgattcttttacggtggctactccgctgtcattacagtctactacgaccagaacaagaacaagaaataacacagtatcttctcagatcactgcaagttcttctttgactactgatgtgggcaatgccacgagtgcaaatatttggagtgctaatgcagaaagtaatacttcttccagtcctttgtttgattatcctctcgccacttcttattttgagccattgactagattcaagtccactgataattatacgctgcctcaaacagctcaactaaacagttttctggagaaaaatgggaatccaaacatatggtcgagtgcaggaaatagtaacactgaccaccttaatactccgatagttaacaggcagcgctctcaatctcaatctaccacaaacagggtttatactgacgcgccctactatcaacagcctgcacagaattaccaggttcaagtgcctcctagagttccaaaaagtacttcaatatcccctgttatccttgatgacgtcgatccagcctcgataaattggattacagcaaaccaaaaagtaccactagtcaatcaaatatcggcgcttttgcccactaacacaatatctatttcaaacgtgtttccattacagcctactcaacaacatcaacagaacgctgtaaatttgacgagtacttccttagcgactttatgttcacagtatggtaaagtgctttctgcgaggacactaagaggcctgaatatggcattagtagagttttccacagttgaaagtgcaatatgtgctttggaagctctacaaggtaaggaactgtctaaagtaggggcaccaagtacggtatcttttgcgcgagtcttacccatgtatgaacaacctcttaacgttaatggcttcaacaacactcccaagcaaccgctgttgcaagaacagttgaatcacggggtgctcaattatcagctgcaacaatcgctacaacagccggagctacaacaacaaccaacttcatttaatcaaccaaatcttacatattgtaatcccactcagaatttgagccatctgcaattatcttcaaacgaaaatgaaccttaccctttcccgttgcctccaccatcattatcggatagtaaaaaggatatattacacactataagttcttttaagttagaatatgatcatctagagttgaatcatctcttgcagaatgccttgaaaaataaaggagtgtctgatacaaattattttggtcccctgcctgagcacaactccaaagttccaaagagaaaggatacgttcgatgcaccaaaattgcgggaactgagaaagcagtttgactcgaactcattatctactattgaaatggagcaattggcaatcgtcatgctggaccaattaccagaattaagttcagactatttgggtaataccgttattcaaaaattgtttgaaaactcgtcaaatatcatcagggatattatgttgaggaagtgtaataaatatctcacatctatgggtgttcacaaaaacggtacttgggtttgtcagaagatcatcaaaatggcaaacacgccaaggcagataaatcttgtaacttcaggtgtaagcgattactgtactccactcttcaacgaccagtttggaaattatgttattcaaggtattttaaagtttggttttccctggaatagtttcatttttgaaagcgttttatctcatttttggacaatagttcaaaacaggtatggatctcgtgctgtaagggcttgtctagaagcagattccattattacccaatgccaattgctgactatcacttcactgataattgtgctttctccttatctagctacggatacgaatggcactttactgatcacttggctattggatacttgcactttacctaacaagaacttgattttatgtgataaactggtaaataaaaatctggttaaactatgttgtcataaattaggctctcttactgtcttaaagattctcaatttaagaggtggtgaagaagaggcactgtcgaagaataaaattatccatgcaatatttgatggtccaatttctagtgattctatcttgttccagatactagatgagggtaattatggtccaacatttatttataaggttttaacctcgagaattcttgacaatagcgttagagatgaagctataacaaagattcgtcaactgattttaaattccaatatcaatttacaaagtcgccagttactggaggaagttgggctatcatcagcaggaatatcacccaaacaatcctccaagaatcatcgtaaacagcatcctcaggggtttcattctcctggtcgcgccagaggcgtttctgtttccagtgtgagaagttcaaattcaaggcataatagcgttatacaaatgaacaatgcaggtccaacgccagcattgaactttaacccagccccgatgagtgaaataaattcctacttcaacaatcaacaagtggtgtactccggaaatcaaaatcaaaatcagaacggtaattctaacggattagatgaattgaattcacaatttgattcatttagaattgctaatggaacaaatttatccctacctatagttaacttaccaaatgtaagtaataataataacaattataataattctggttattcgagtcaaatgaatcctctaagccgctcagtgagtcataataacaataataataccaataactacaacaataatgataatgataacaataataataacaataacaataataataataataataataataataataataataataatagtaataatagtaataataataataataatgatacaagtttgtaccgctacaggtcatacggatattag

SEQ ID NO: 11514 - DNA, 3228 bp, Artificial Sequence
  Description of Artificial Sequence: Synthetic polynucleotide
atggacaacaaaagattatataacggtaacctttccaacattcctgaggttatagatcctggaattacaattccaatttatgaagaggatattagaaatgatacacgcatgaatacaaatgctcgttctgtgagagtctctgacaagagaggtcgttctagctccacttccccacagaaaattggctcctatcgtactcgtgcgggcaggttttctgatactttgaccaatttactcccttctattagcgctaagttgcaccattctaagaagagtacccctgtagttgttgtgcctcctacgagcagtactccagacagtttaaattccacgacatacgctcccagagtgtctagcgattcttttacggtggctactccgttatctttacagtctactacgaccagaacaagaacaagaaataacacagtatcttctcagatcactgcaagttcttctttgactactgatgtgggcaatgccacgagtgcaaatatttggagtgctaatgcagaaagtaatacttcttccagtcctttgtttgattatcctctcgccacttcttattttgagccattgactagattcaagtccactgataattatacgttacctcaaacagctcaattgaacagttttttggagaaaaatgggaatccaaacatatggtctagtgcaggaaatagtaacactgaccaccttaatactccgatagttaacaggcagcgctctcaatctcaatctaccacaaacagggtttatactgacgcgccctactatcaacagcctgcacagaattaccaggttcaagtgcctcctagagttccaaaaagtacttccatatcccctgttatccttgatgacgtcgatccagcctctataaattggattacagcaaaccaaaaagtaccattagtcaatcaaatatctgcgcttttgcccactaacacaatatctatttccaacgtgtttccattacagcctactcaacaacatcaacagaacgctgtaaatttgacgagtacttccttagcgactttatgttctcagtatggtaaagtgctttctgcgaggacattaagaggcttgaatatggcattagtagagttttccacagttgaaagtgcaatatgtgctttggaagctttacaaggtaaggaattatctaaagtaggggcaccaagtacggtatcttttgcgagggtcttacccatgtatgaacaacctcttaacgttaatggcttcaacaacactcccaagcaaccgttattgcaagaacagttgaatcacggggtgctcaattatcagttacaacaatctttacaacagccggagttacaacaacaaccaacttcttttaatcaaccaaatcttacatattgtaatcccactcagaatttgagccatttacaattatcttccaacgaaaatgaaccttaccctttcccgttgcctccaccatctttaagtgatagtaaaaaggatatattacacactataagttcttttaagttagaatatgatcatttagagttgaatcatctcttgcagaatgccttgaaaaataaaggagtgtctgatacaaattattttggtcccttacctgagcacaactccaaagttccaaagagaaaggatacgttcgatgcaccaaaattgagagaattgagaaagcagtttgactccaactctttatctactattgaaatggagcaattggcaatcgtcatgttggaccaattaccagaattaagtagtgactatttgggtaataccgttattcaaaaattgtttgaaaactcttccaatatcatcagggatattatgttgaggaagtgtaataaatatctcacatctatgggtgttcacaaaaacggtacttgggtttgtcagaagatcatcaaaatggcaaacacgccaaggcagataaatcttgtaacttctggtgtaagcgattactgtactccactcttcaacgaccagtttggaaattatgttattcaaggtattttaaagtttggttttccctggaatagtttcatttttgaaagcgttttatctcatttttggacaatagttcaaaacaggtatggatctcgtgctgtaagggcttgtttagaagcagattccattattacccaatgccaattgttgactatcacttctttgataattgtgctttctccttatttggctacggatacgaatggcactttattgatcacttggttattggatacttgcactttacctaacaagaacttgattttatgtgataaattagtaaataaaaatttggttaaattatgttgtcataaattaggctctcttactgtcttaaagattctcaatttaagaggtggtgaagaagaggcattatccaagaataaaattatccatgcaatatttgatggtccaatttctagtgattctatcttgttccagatattggatgagggtaattatggtccaacatttatttataaggttttaacctccagaattcttgacaatagcgttagagatgaagctataacaaagattcgtcaattgattttaaattccaatatcaatttacaaagtcgccagttattggaggaagttgggctttcttctgcaggaatatctcccaaacaatcctccaagaatcatcgtaaacagcatcctcaggggtttcattctcctggtcgcgccagaggcgtttctgtttccagtgtgagaagtagtaattctaggcataatagcgttatacaaatgaacaatgcaggtccaacgccagcattgaactttaacccagccccgatgagtgaaataaattcctacttcaacaatcaacaagtggtgtactccggaaatcaaaatcaaaatcagaacggtaattctaacggattagatgaattgaattctcaatttgattcttttagaattgctaatggaacaaatttatccttacctatagttaacttaccaaatgtaagtaataataataacaattataataattctggttattctagtcaaatgaatcctttaagccgcagtgtgagtcataataacaataataataccaataactacaacaataatgataatgataacaataataataacaataacaataataataataataataataataataataataataataatagtaataatagtaataataataataataatgatacaagtttgtaccgctacaggtcttacggatattga

SEQ ID NO: 11515 - DNA, 279 bp, Saccharomyces cerevisiae
atggctaaaagaactaagaaggttggtatcactggtaagtacggtgtccgttatggttcctctttgagaagacaagtcaagaagttggaaatccaacaacacgctagatacgattgttctttctgtggtaagaagaccgtcaagagaggtgctgctggtatttggacttgttcctgttgtaagaagaccgtcgctggtggtgcttacactgtctccactgctgctgccgccaccgttagatctaccatcagaagattgagagaaatggttgaagcttga

SEQ ID NO: 11516 - DNA, 279 bp, Artificial Sequence; identical to SEQ ID NO: 11515
  Description of Artificial Sequence: Synthetic polynucleotide

SEQ ID NO: 11517 - DNA, 1413 bp, Saccharomyces cerevisiae
atgcagaatccttacggtcactttactaacaataccacggaggacagggaagcttcatctcaaggaggaccattcggccaaagcctgaataggcccctagattacgccggatctttcccttctctgacatacaataataataatttcattgccaatcaacaaccttctctgcctttgccagaaccacgtttatcttggaacaacgtcaaccaggtttctaaccctttgatggtaacaccgcttccgggattacaaaaacgtatgaacaaaaacattaaaaagaaattaccaagagtatctaagaaggcatcagccctttctaacggggtatccggcaatgtaatgagcaacagtaatatagtagggcatggtgctgtaggttcggcatcgggatggaaagttgaaatgggtggcagtgatgaattagagagaagaaagagaagggcagaaagattcagtcagggaccatcagcgacgacgaatagtaacgataatttgaatgaagactttgccaacctaaatgccattagtagcaaatctcatcaatatgacaaaaagattcatgtggtagggcgttgccaaactctagagaaatcttatctgagactaacttcagagcctaatcctgacttgatcagacccccaaatattctacaaaaaatgtattgcttgttaatggacaaataccaatctaaaacagccacttatacttacctttgcgaccagtttaaatcaatgagacaagacctaagagtgcaaatgatcgagaactctttcactattaaagtgtaccaaacgcatgcacgtattgccttggagaacggagatcttggggaatttaatcaatgtcaaaataggattatggcgttattcgaaaaccctacaataccaaaaaaatcttattccgaatttatatgctattctgttttgtattcgatgttaaccgaagactatccgtcgatttctcatttaaaacttaagttaatagacgatggctcttcggaaatcttggaggacgaacatgtcaaaatgatatttgagttgagcgatatgaaactagtcggcaattatcactacttcatgaaaaactacctaaaactgcacaaatttgaaaaatgtctaattaattcattcttaaatctagaaaagttgatatttttgaccataatttgtaagagttataaccaggtcaatttagattttgttaaaagtgagtttaatttcaacagtatagaagagacaacaaatttcttgaatgagcaaaacttgacggagttcatattaaacaaacaaatcactgacagtaatggcaaaagtagtaatatcaagattttgaataccaagggatgtagggtacagttgatacaaaattatatgaagtctaaaaaaattgatataaagggacaaaaatga

SEQ ID NO: 11518 - DNA, 1413 bp, Artificial Sequence
  Description of Artificial Sequence: Synthetic polynucleotide
atgcagaatccttacggtcactttactaacaataccacggaggacagggaagcttcttctcaaggaggaccattcggccaaagcttgaataggcccttagattacgccggatctttcccttctttaacatacaataataataatttcattgccaatcaacaaccttctttgcctttgccagaaccacgtttatcttggaacaacgtcaaccaggtttctaaccctttgatggtaacaccgcttccgggattacaaaaacgtatgaacaaaaacattaaaaagaaattaccaagagtatctaagaaggcatctgccctttctaacggggtatccggcaatgtaatgagcaacagtaatatagtagggcatggtgctgtaggttctgcatctggatggaaagttgaaatgggtggcagtgatgaattagagagaagaaagagaagggcagaaagattcagtcagggaccatctgcgacgacgaatagtaacgataatttgaatgaagactttgccaacttgaatgccattagtagcaaatctcatcaatatgacaaaaagattcatgtggtagggcgttgccaaactttagagaaatcttatttaagattaacttccgagcctaatcctgacttgatcagacccccaaatattttacaaaaaatgtattgcttgttaatggacaaataccaatctaaaacagccacttatacttacctttgcgaccagtttaaatctatgagacaagacttgagagtgcaaatgatcgagaactctttcactattaaagtgtaccaaacgcatgcacgtattgccttggagaacggagatcttggggaatttaatcaatgtcaaaataggattatggcgttattcgaaaaccctacaataccaaaaaaatcttattccgaatttatatgctattctgttttgtattccatgttaaccgaagactatccgtctatttctcatttaaaacttaagttaatagacgatggctcttctgaaatcttggaggacgaacatgtcaaaatgatatttgagttgagcgatatgaaattggtcggcaattatcactacttcatgaaaaactacttgaaattacacaaatttgaaaaatgtttaattaattctttcttaaatttggaaaagttgatatttttgaccataatttgtaagagttataaccaggtcaatttagattttgttaaaagtgagtttaatttcaacagtatagaagagacaacaaatttcttgaatgagcaaaacttgacggagttcatattaaacaaacaaatcactgacagtaatggcaaaagtagtaatatcaagattttgaataccaagggatgtagggtacagttgatacaaaattatatgaagtctaaaaaaattgatataaagggacaaaaatga

SEQ ID NO: 11519 - DNA, 546 bp, Saccharomyces cerevisiae
atgacaaacagtagtgaaaaacaatgggaaagaatccagcaattagaaaaggagcacgtggaggtatatagagagttgttgatcacgttggacaggttgtacttgattagaaaacacaatcatgcggtaatattaagccatactcaacagcgcctcttggaaattagacaccaacttcaaattaatcttgaaaagactgctcttcttattagactgttggagaaaccggacaataccaatgtattattcaccaagctacaaaacctcttagaagaaagcaattctctggactatgagctcttgcaatcgttaggtgctcaatcttcattgcacaaacagttgattgaatcaagagcagaacgcgacgaattgatgtcaaaactgattgagttatcgtcgaagtttcccaaaccaactataccgccagacgacagtgatactgctggaaaacaggttgaggtagaaaaggaaaatgaaacgatacaagaattgatgattgctttacagatacactccggatatacaaacatatcctacacaatttga

SEQ ID NO: 11520 - DNA, 546 bp, Artificial Sequence
  Description of Artificial Sequence: Synthetic polynucleotide
atgacaaacagtagtgaaaaacaatgggaaagaatccagcaattagaaaaggagcacgtggaggtatatagagagttgttgatcacgttggacaggttgtacttgattagaaaacacaatcatgcggtaatattaagccatactcaacagcgcctcttggaaattagacaccaacttcaaattaatcttgaaaagactgctcttcttattagattattggagaaaccggacaataccaatgtattattcaccaagttacaaaacctcttagaagaaagcaattctttggactatgagctcttgcaatctttaggtgctcaatcttctttgcacaaacagttgattgaatctagagcagaacgcgacgaattgatgtccaaattgattgagttatcttccaagtttcccaaaccaactataccgccagacgacagtgatactgctggaaaacaggttgaggtagaaaaggaaaatgaaacgatacaagaattgatgattgctttacagatacactccggatatacaaacatatcctacacaatttga

SEQ ID NO: 11521 - DNA, 1410 bp, Saccharomyces cerevisiae
atgtttctcaatagaatgatgaagaccaggactggtctttatcgcttatattcaacccttaaagttccacatgtagaaatcaatggcataaaatacaagaccgacccacagactaccaatgttacagattcaataataaagcttaccgacagatcattacatttgaaagaatcacatccagtaggcattcttcgcgatctaattgaaaagaaattaaactcagtcgacaacacatttaagatctttaataatttcaagcccgtggtaaccacaatggaaaacttcgattctttagggtttcctaaggatcatcctggaagatcaaaatctgacacatattatataaatgagacgcacctactgagaacacatacttcagcccacgaattagagtgctttcaaaaaataagaaacgattcagataatattaaaagtggatttttaatatctgcagatgtgtacagaagagatgaaattgacaaaactcactatccggtattccaccaaatggaaggagccacaatttggaaacgaacgaaggctgatgtgggcgtaaaggagccaatgtatatcgagaaaatccgtgaagatatcagacaggtagagaaccttttaaataaagaaaatgtaaagattacggttgacgatgatactatacctttgaaagaaaataatcctaaacaagagtatatgtccgatctggaggttgatttgtgctctcaacatttgaagaggtccattgaactgatagtttctgaagtttttaacaaaaaaatatctagcatgatcaagaacaaagcgaataatacacccaaagagctaaaagtccgttggattaacgcttacttcccctggaccgcgccctcatgggaaatagaggtttggtggcagggcgaatggctcgaactctgcggatgcggattgattcgtcaagatgtgctactaagagccggatataaaccttctgaaacaattgggtgggcttttggcttgggtttggaccgcattgctatgcttctttttgaaattccagatattagactgctttggagtcgtgatgaaagattttcaagacaattctccaagggattaattacttccttcaaaccttattcaaaacacccgggatcatttagggatgttgcgttttggttaccagaagataaaccagatattcatcaagttcatgaaaatgatttgatggaaattatcagaaatatagctggcgatttggtagagagtgtcaagctagtcgatagctttacgcatccgaaaactgggagaaaatctatgtgctacaggatcaactatcaatcaatggacagaaatttgacaaacgccgaagttaacactttgcaagacatggtgtgttctaaattggtaaaagaatacagcgtagaactcagatag

SEQ ID NO: 11522 - DNA, 1410 bp, Artificial Sequence
  Description of Artificial Sequence: Synthetic polynucleotide
atgtttctcaatagaatgatgaagaccaggactggtctttatcgcttatattctacccttaaagttccacatgtagaaatcaatggcataaaatacaagaccgacccacagactaccaatgttacagattctataataaagcttaccgacagatctttacatttgaaagaaagtcatccagtaggcattcttcgcgatttgattgaaaagaaattaaactctgtcgacaacacatttaagatctttaataatttcaagcccgtggtaaccacaatggaaaacttcgattctttagggtttcctaaggatcatcctggaagaagtaaatctgacacatattatataaatgagacgcacttgttaagaacacatacttctgcccacgaattagagtgctttcaaaaaataagaaacgattctgataatattaaaagtggatttttaatatctgcagatgtgtacagaagagatgaaattgacaaaactcactatccggtattccaccaaatggaaggagccacaatttggaaaagaacgaaggctgatgtgggcgtaaaggagccaatgtatatcgagaaaatccgtgaagatatcagacaggtagagaaccttttaaataaagaaaatgtaaagattacggttgacgatgatactatacctttgaaagaaaataatcctaaacaagagtatatgtccgatttagaggttgatttgtgctctcaacatttgaagaggtccattgaattgatagtttctgaagtttttaacaaaaaaatatctagcatgatcaagaacaaagcgaataatacacccaaagagttgaaagtccgttggattaacgcttacttcccctggaccgcgcccagctgggaaatagaggtttggtggcagggcgaatggctcgaactctgcggatgcggattgattcgtcaagatgtgcttttgagagccggatataaaccttctgaaacaattgggtgggcttttggcttgggtttggaccgcattgctatgcttctttttgaaattccagatattagattactttggagtcgtgatgaaagattttccagacaattctccaagggattaattacttccttcaaaccttattctaaacacccgggaagttttagggatgttgcgttttggttaccagaagataaaccagatattcatcaagttcatgaaaatgatttgatggaaattatcagaaatatagctggcgatttggtagagagtgtcaagttggtcgatagctttacgcatccgaaaactgggagaaaatctatgtgctacaggatcaactatcaatctatggacagaaatttgacaaacgccgaagttaacactttgcaagacatggtgtgttctaaattggtaaaagaatacagcgtagaactcagatga

SEQ ID NO: 11523 - DNA, 1872 bp, Saccharomyces cerevisiae
atgtcatcgagcaagaaaatcgtcatcctctatggatcggagacaggtaacgcgcatgattttgctacaatcttatcccatcgactacatcgctggcatttctcccatacattttgctccattggtgattatgacccacaggatatcttgaaatgcaggtacctttttattatatgctccacaacaggccaaggtgaattaccaaggaatgtcaatgcattaaaaggtgaaagacccgtcacgttctggtcgtttttaaagagaaagaatcttccgtcgaatttgctcaaccatattcaaactgccatgcttggacttggtgattcatcttatcctaagtttaactacggcattagaaagctacatcagcgcattgtcacacaattgggtgctaatgaattattcgatagattggaggctgacgaccaggctatggctggtagcaataagggtacaggtctcggaattgaatcagtatattttgaatatgaaaagaaagtcctaagctttcttttaagtaagtaccccaacagaaaggtcaatggccaaataattaagagggaagaattggaccctgaggtttacctagagccagcatcctacctacagctttcagacgaacatgccaatgaaaagttcactagcaccaaggttatattcgaaggtgatgaatcgttaaaggttggcagagttaatataaacaaaaggattacatctgaaggtcatttccaagacgtgaggcagttcaagtttagtaatgtggacaagattcaagaaaactatgaacccggtgatacagtaaccatatatccttgcaatacagatgaggatgtttcaagattcctagcaaatcaaagccattggttagaaattgcggacaaaccattgaatttcaccagtggagttcctaatgatcttaaggatggtggattagttcgcccgatgactttaaggaacttgttgaaatatcactgtgatttcatgagcattcctagaacaagttttttcttgaagatttggacctttgcaactgatgtaactaagatggaacgtggccaagaacaactgaatgatcaaagagaaaaattgcgccaatttgctactgatcaagatatgcaggacttatatgactactgtaatagacccagaaggtcaattcttgaagtactggaagattttatctccgtaaagttgccctggaaatatgtgctagattacttgcccatcattaaaccaaggtactactctatatctagcggccctggggatcctaatattgaattaacagttgcgatagtaaaatataaaactatcttaaggaaaattcgaagaggaatttgcactaactacattgcacgattgcaagagggggaacagataaggtataagttacaaaataatcacataatcaaaaaggaatttttgaataaacctatgattcttgtcggaccgggtgtcggtctagcaccattattatcagtggttaaagcggagatatctaaagatatcaaactcctcttcggttgtagatataaagataaagattatatttataaagatatgctggaagattggttccgtaagggcaaaattgccttacattcatccttttccagagatgaggaaaattcaccaggtgttaaatatgtccaagactacttatggagattaggtgaggaaataactaatttggtagttaataaagacgccgtttttttcttatgtggctcatcaggtaaaatgcctatccaagtcagattaacattcattgaaatgttaaaaaaatggggcaattttagtgatgaagaaactgccaaaaaatacctgaaagaaatggaaaaatctgatagatatatccaggaaacttggtag

SEQ ID NO: 11524 - DNA, 1872 bp, Artificial Sequence
  Description of Artificial Sequence: Synthetic polynucleotide
atgtcttctagcaagaaaatcgtcatcctctatggatctgagacaggtaacgcgcatgattttgctacaatcttatcccatagattacatcgctggcatttctcccatacattttgctccattggtgattatgacccacaggatatcttgaaatgcaggtacctttttattatatgctccacaacaggccaaggtgaattaccaaggaatgtcaatgcattaaaaggtgaaagacccgtcacgttctggtcttttttaaagagaaagaatcttccgtccaatttgctcaaccatattcaaactgccatgcttggacttggtgattcttcttatcctaagtttaactacggcattagaaagttgcatcagcgcattgtcacacaattgggtgctaatgaattattcgatagattggaggctgacgaccaggctatggctggtagcaataagggtacaggtctcggaattgaaagtgtatattttgaatatgaaaagaaagtcttgagctttcttttaagtaagtaccccaacagaaaggtcaatggccaaataattaagagggaagaattggaccctgaggtttacttggagccagcatcctacttacagctttctgacgaacatgccaatgaaaagttcactagcaccaaggttatattcgaaggtgatgaatctttaaaggttggcagagttaatataaacaaaaggattacatctgaaggtcatttccaagacgtgaggcagttcaagtttagtaatgtggacaagattcaagaaaactatgaacccggtgatacagtaaccatatatccttgcaatacagatgaggatgtttctagattcttggcaaatcaaagccattggttagaaattgcggacaaaccattgaatttcaccagtggagttcctaatgatcttaaggatggtggattagttcgcccgatgactttaaggaacttgttgaaatatcactgtgatttcatgagcattcctagaacaagttttttcttgaagatttggacctttgcaactgatgtaactaagatggaacgtggccaagaacaattgaatgatcaaagagaaaaattgcgccaatttgctactgatcaagatatgcaggacttatatgactactgtaatagacccagaaggtctattcttgaagtattggaagattttatctccgtaaagttgccctggaaatatgtgttggattacttgcccatcattaaaccaaggtactactctatatctagcggccctggggatcctaatattgaattaacagttgcgatagtaaaatataaaactatcttaaggaaaattagaagaggaatttgcactaactacattgcaagattgcaagagggggaacagataaggtataagttacaaaataatcacataatcaaaaaggaatttttgaataaacctatgattcttgtcggaccgggtgtcggtttggcaccattattatctgtggttaaagcggagatatctaaagatatcaaactcctcttcggttgtagatataaagataaagattatatttataaagatatgttggaagattggttccgtaagggcaaaattgccttacattcttccttttccagagatgaggaaaattctccaggtgttaaatatgtccaagactacttatggagattaggtgaggaaataactaatttggtagttaataaagacgccgtttttttcttatgtggctcttctggtaaaatgcctatccaagtcagattaacattcattgaaatgttaaaaaaatggggcaattttagtgatgaagaaactgccaaaaaatacttgaaagaaatggaaaaatctgatagatatatccaggaaacttggtga

SEQ ID NO: 11525 - DNA, 3537 bp, Saccharomyces cerevisiae
atggcagacgctgatgaatatagcactgcacctacccagcaagaaataacaccactgcagacaacagccactatcataaatgcaatatctggagaatgtataactacgaatgttgattttttcgtttccctggacaaatttaaacagttcattgctaggaaatggaagattcctcccgatcagctgctgattctactaccttatggtaacaaactaaaaccgtcgatgtttaaagagctgcttattaataggtcttttactctaaatgatttttacgtttacgacagacgactattctcacttgttagtaaaccgacaccaacaaatcttttaacgtctaaggattctaatcccatgaactcccctaattccaacgacttgacagagactctggaatatttaattaagaatagtcatatatctcaataccaaggtagcgatactattatgatcaagcctatgccctcgcctttggaggacgcagacgtagatctttcgcgtttaaattaccattccgtaactagcttactgacgacgaaccttggttggctaagcgctttagaaatagatgtacattattttaagagcctcataccagacataatagcccatattaagcgtatttttgatggcttaaccgtttgctcacaatatttgaagctgtactgctttgatgtagaaagtttgtataactcaaacgttcaatttttaaatcagctggtagacaatggtatgacttcaaaatgggaaaaatgcttcaatgacaccttgagtaagttgactgctttagagggtgattctttacaaaagttcattaatattgaatctctcctggagaacgaaaaatctgtaaagattctaaatcattcaatcaatggtaagctgaataaaattaagagggaaattgacgaaaatgcaagttttagagatattataacagtaaacatcgatcgactgcggcaaatgtttaccccgaatgaatctaaattcgagcttgaagaccaaatggcagagagctttgaggtactggtatcagaaatgcgaacaagaagcagaaatgtacttgataaagaagaagaagaattcaatagtcaagaatttttgaaaagcatgaatgtgatgttggaaaaggataaaaaagaatcagtgaaaactctcttcactatatcacaagcgctgtattcacaaataggagaactaatagatttaaaaaaaagtctacaaaagcatgcagtagccattttgggtaacatagcattcacccagatggaaatcctaggtattaaaagactattattgaatgaatgtaataaagatttagagctatacaagaaatatgaggtagaatttgcacaggtagaagatttgcctctgatatatgggctttatttaatcgaaaaatatcgtaggctatcatggttccaacaaattttgtcatttatctcaaattttaatcaagatttagagttgttcaaacaaaatgaattacgaacaagaaataaatgggttaaaaatttcggttccatcgcgactgttttttgcgaagatctattgtcttcctctgatttcaaacgtctaaacgaatatcactctcatacttctccaccaaatgaagatgaggaagatgaaaatgagaattctatagcaaattaccgccaagacctggtaaaagtatcgcaagccattgataattatatgacgcaaattaaagaaacagatgtttctgaaccgatcattgatctactttcgaaaacactttttgagacgaagagatttcatataatatattccaatttcaaaaataataacaataatagttctaatggcaatagcatttcccctgaagggtctattgccttgaaaagtgatgatgtagtcaaaggatacaaaacaagaataaaaaaattagaatcgctattacatgagtttcaatattccgacataggccattggcctcaaggtgttctcaatacccatcttaagccatttcgtggttctgctacgagtataaacaagaagaaattcctgggagcatctgtattactagagcctgccaatatttctgaagtgaacattgatagtgtttcgcaagctaataatcatcaaattcaagagttagagagtaatgtggatgatctattacaccaacttcaactattgaaagaagaaaataatcgaaaatcaatgcaaatttcggaaatggggaaaaaaataagtgatctagaggtggagaagacagcttatcgcgaaactttgactaatttgaatcaagaattggcaaggttaactaatgaagaacaatcgcatagaactgaaatttttaccctcaatgcctctttcaaaaagcaattgaatgatataattagccaagacaatgaaaagatagaaaagctaacaggtgactatgatgatgttagcaaatcgagggaacgattgcaaatggatctggatgaatctaataagaagcatgaacaagaggtcaatttgttgaaggctgatattgaaaggctcggtaaacaaattgtgacttcagagaaaagttacgctgagactaactcaagctcgatggaaaaaggtgagaaattcgaaaccattcctcttgctgaggacccaggtagggaaaaccagatatctgcatacacacagactctgcaagatagaatatttgatataatatcgacaaatattttcattttggagaacattgggttgctgttaaccttcgacaataataataacatccaaattagacgagtcaagggattgaaaaagggaaccgcccaaagtaatatactggatgaaagcacacaaatgctggacgcacatgataattctctaataaaaagtccggttttccagaaattgaaagatgagtatgaattaataaagtcagttgccaatggatctgaaaaggatacacagcaaagcatttttctggggaatatcactcaattatatgacaataagctttatgaagttgccgttatcaggagattcaaggatattgagaccttggccaaaaaattaactaaagaaaataagatcaagagaacgctattggagagattccaaagggaaaaggtgactttgaggaactttcaaattggcgatttagcattatttttgccaacacgagaaaacgttaattctgtcgggtctatgtcgtcttccacctcatcattgagctcatcattttcatctgttgatttatcaactccaccgcctttggatgctatgtctatacaatcgtctccctcggtgatacatagtaatgtaatcaatcaagccagtatatctggcagggacaagaataaactgatgaggccttgggctgcatttacagcttttgaagaaagcacaagatattttttaaaggacgaaaaaggattgacgaaggggaaagaatggtttgtaggcagaattgtcactttggaacatttcgtagcagatagcccctctaataatccatttagactaccaaagggctcagtttggtttcaggtcactgcggttgtggtttcataccagggagtttga

SEQ ID NO: 11526 - DNA, 3537 bp, Artificial Sequence
  Description of Artificial Sequence: Synthetic polynucleotide
atggcagacgctgatgaatatagcactgcacctacccagcaagaaataacaccattacagacaacagccactatcataaatgcaatatctggagaatgtataactacgaatgttgattttttcgtttccttggacaaatttaaacagttcattgctaggaaatggaagattcctcccgatcagttattgattttattgccttatggtaacaaattgaaaccgtctatgtttaaagagttgcttattaataggtcttttactttgaatgatttttacgtttacgacagaagattattctctcttgttagtaaaccgacaccaacaaatcttttaacgtctaaggattctaatcccatgaactcccctaattccaacgacttgacagagactttggaatatttaattaagaatagtcatatatctcaataccaaggtagcgatactattatgatcaagcctatgccctctcctttggaggacgcagacgtagatctttctcgtttaaattaccattccgtaactagcttattgacgacgaaccttggttggttaagcgctttagaaatagatgtacattattttaagagcctcataccagacataatagcccatattaagcgtatttttgatggcttaaccgtttgctctcaatatttgaagttgtactgctttgatgtagaaagtttgtataactccaacgttcaatttttaaatcagttggtagacaatggtatgacttctaaatgggaaaaatgcttcaatgacaccttgagtaagttgactgctttagagggtgattctttacaaaagttcattaatattgaatctctcttggagaacgaaaaatctgtaaagattttgaatcattctatcaatggtaagttgaataaaattaagagggaaattgacgaaaatgcaagttttagagatattataacagtaaacatcgatagattaagacaaatgtttaccccgaatgaatctaaattcgagcttgaagaccaaatggcagagagctttgaggtattggtatctgaaatgagaacaagaagcagaaatgtacttgataaagaagaagaagaattcaatagtcaagaatttttgaaaagcatgaatgtgatgttggaaaaggataaaaaagaatctgtgaaaactctcttcactatatctcaagcgttatattctcaaataggagaattgatagatttaaaaaaaagtttacaaaagcatgcagtagccattttgggtaacatagcattcacccagatggaaatcttgggtattaaaagattattattgaatgaatgtaataaagatttagagttatacaagaaatatgaggtagaatttgcacaggtagaagatttgcctttgatatatgggctttatttaatcgaaaaatatcgtaggttatcttggttccaacaaattttgagttttatctctaattttaatcaagatttagagttgttcaaacaaaatgaattaagaacaagaaataaatgggttaaaaatttcggttccatcgcgactgttttttgcgaagatttattgtcttcctctgatttcaaacgtttgaacgaatatcactctcatacttctccaccaaatgaagatgaggaagatgaaaatgagaattctatagcaaattaccgccaagacttggtaaaagtatctcaagccattgataattatatgacgcaaattaaagaaacagatgtttctgaaccgatcattgatttactttctaaaacactttttgagacgaagagatttcatataatatattccaatttcaaaaataataacaataatagttctaatggcaatagcatttcccctgaagggtctattgccttgaaaagtgatgatgtagtcaaaggatacaaaacaagaataaaaaaattagaatctttattacatgagtttcaatattccgacataggccattggcctcaaggtgttctcaatacccatcttaagccatttcgtggttctgctacgagtataaacaagaagaaattcttgggagcatctgtattattggagcctgccaatatttctgaagtgaacattgatagtgtttctcaagctaataatcatcaaattcaagagttagagagtaatgtggatgatttattacaccaacttcaattattgaaagaagaaaataatagaaaatctatgcaaatttctgaaatggggaaaaaaataagtgatttagaggtggagaagacagcttatcgcgaaactttgactaatttgaatcaagaattggcaaggttaactaatgaagaacaatctcatagaactgaaatttttaccctcaatgcctctttcaaaaagcaattgaatgatataattagccaagacaatgaaaagatagaaaagttaacaggtgactatgatgatgttagcaaatctagggaaagattgcaaatggatttggatgaatctaataagaagcatgaacaagaggtcaatttgttgaaggctgatattgaaaggctcggtaaacaaattgtgacttccgagaaaagttacgctgagactaactccagcagtatggaaaaaggtgagaaattcgaaaccattcctcttgctgaggacccaggtagggaaaaccagatatctgcatacacacagactttacaagatagaatatttgatataatatctacaaatattttcattttggagaacattgggttgttattaaccttcgacaataataataacatccaaattagaagagtcaagggattgaaaaagggaaccgcccaaagtaatatattggatgaaagcacacaaatgttggacgcacatgataattctttgataaaaagtccggttttccagaaattgaaagatgagtatgaattaataaagtctgttgccaatggatctgaaaaggatacacagcaaagcatttttttggggaatatcactcaattatatgacaataagctttatgaagttgccgttatcaggagattcaaggatattgagaccttggccaaaaaattaactaaagaaaataagatcaagagaacgttattggagagattccaaagggaaaaggtgactttgaggaactttcaaattggcgatttagcattatttttgccaacaagagaaaacgttaattctgtcgggtctatgtcttcttccacctcttctttgagctcttctttttcttctgttgatttatctactccaccgcctttggatgctatgtctatacaatcttctccctctgtgatacatagtaatgtaatcaatcaagccagtatatctggcagggacaagaataaattaatgaggccttgggctgcatttacagcttttgaagaaagcacaagatattttttaaaggacgaaaaaggattgacgaaggggaaagaatggtttgtaggcagaattgtcactttggaacatttcgtagcagatagcccctctaataatccatttagattaccaaagggctctgtttggtttcaggtcactgcggttgtggtttcttaccagggagtttga

SEQ ID NO: 11527 - DNA, 531 bp, Saccharomyces cerevisiae
atggaaatagtgtacaagccattggacatacgtaacgaagagcagtttgctagtattaaaaaactaatagatgcggatctatcagagccgtactcgatatacgtatataggtatttcttgaaccaatggcccgagttaacgtacattgccgttgacaacaagagtggaacgcctaacatacccattggttgcatagtgtgtaagatggacccgcatagaaacgtgagactgagaggatatataggaatgctagccgtagagtccacataccgcgggcatggcatagcaaagaaactagtggaaattgccatagataaaatgcaaagggaacattgcgatgagatcatgttagaaacagaggtggaaaattcggcggctctaaacttatatgaaggaatgggtttcatcagaatgaaacggatgttccgctactacttgaatgaaggggacgcctttaaactgatattgccgttgactgaaaagagctgcactcggtctacgttcctaatgcatggccggctggccacataa

SEQ ID NO: 11528 - DNA, 531 bp, Artificial Sequence
  Description of Artificial Sequence: Synthetic polynucleotide
atggaaatagtgtacaagccattggacatacgtaacgaagagcagtttgctagtattaaaaaattgatagatgcggatttatctgagccgtactctatatacgtatataggtatttcttgaaccaatggcccgagttaacgtacattgccgttgacaacaagagtggaacgcctaacatacccattggttgcatagtgtgtaagatggacccgcatagaaacgtgagattgagaggatatataggaatgttggccgtagagtccacataccgcgggcatggcatagcaaagaaattagtggaaattgccatagataaaatgcaaagggaacattgcgatgagatcatgttagaaacagaggtggaaaattctgcggctttgaacttatatgaaggaatgggtttcatcagaatgaaaagaatgttccgctactacttgaatgaaggggacgcctttaaattgatattgccgttgactgaaaagagctgcactagatctacgttcttaatgcatggcagattggccacatga

SEQ ID NO: 11529 - DNA, 282 bp, Saccharomyces cerevisiae
atggtcaccccaagagaacctaagaagagaaccactagaaagaagaaggacccaaatgcccctaagagggctttgtccgcctacatgtttttcgctaacgaaaacagagatattgttcgttctgaaaatccagatatcacatttggacaagtcggcaagaagttgggtgagaagtggaaggctctaacgccagaggaaaagcagccttacgaggccaaggcccaggccgataagaagagatatgaatccgaaaaggagttatataacgccactttggcttag

SEQ ID NO: 11530 - DNA, 282 bp, Artificial Sequence
  Description of Artificial Sequence: Synthetic polynucleotide
atggtcaccccaagagaacctaagaagagaaccactagaaagaagaaggacccaaatgcccctaagagggctttgtccgcctacatgtttttcgctaacgaaaacagagatattgttcgttctgaaaatccagatatcacatttggacaagtcggcaagaagttgggtgagaagtggaaggctttgacgccagaggaaaagcagccttacgaggccaaggcccaggccgataagaagagatatgaatccgaaaaggagttatataacgccactttggcttga

SEQ ID NO: 11531 - DNA, 456 bp, Saccharomyces cerevisiae
atgatgtatcgcacgacgttaaatactgttcaagtgtcacaaattagtggcgccgaattctaccctcacgcctcgtcgcgcgcgatacttttcgaatcacccgccttttgccgcctatttttttcgccgttcgtttatttagcggtgggcaaacaaacaacacagtatttattactggtaccgactgttaaagaaggactgttttgggacgtgtttttttcctgtttttgctcaattgactaccctatacatagtaaagcacagtcgcaatggtcaccccaagagaacctaagaagagaaccactagaaagaagaaggacccaaatgcccctaagagggctttgtccgcctacatgtttttcgctaacgaaaacagagatattgttcgttctgaaaatccagatatcacatttggacaagtcggcaagaagttgggtgagaagtggaaggctctaa

SEQ ID NO: 11532 - DNA, 456 bp, Artificial Sequence
  Description of Artificial Sequence: Synthetic polynucleotide
atgatgtatcgcacgacgttaaatactgttcaagtgagtcaaattagtggcgccgaattctaccctcacgcctcttctcgcgcgatacttttcgaaagtcccgccttttgccgcttatttttttctccgttcgtttatttagcggtgggcaaacaaacaacacagtatttattattggtaccgactgttaaagaaggattattttgggacgtgtttttttcctgtttttgctccattgactaccctatacatagtaaagcacagtctcaatggtccccccaagagaacttgagaagagaaccattggaaagaagaaggacccaaatgcccttgagagggctttgtccgcctacatgtttttctttgacgaaaacagagatattgttcgttttgaaaatccagatatctcatttggacaagtctgcaagaagttgggtgagaagtggaaggctctga

SEQ ID NO: 11533 - DNA, 1167 bp, Saccharomyces cerevisiae
atgaattgcacacttacagataataccagagccataaatgtggcctccaacctcggtgctcctcaacagaggacgatttttgccaaggagagaatatccatcccaggatactacgagataatccaattcctgggcaagggagcctatgggacagtgtgctcagtgaagtttaagggtcgaagcccagctgctaggatagcggtaaagaagatcagcaacatctttaataaggagatccttttgaaaagggccatccgtgagctaaaattcatgaacttcttcaagggccataaaaatattgtaaatctaatcgatctagagatagtgaccagctcgccctatgacggactgtattgctaccaggaactgattgattatgatttggcaaaagtcatacattcgtccgtgcagctctcggagtttcatatcaaatactttctttaccaaatcctgtgtgggctaaagtacatacacagtgcagatgtcatccaccgagatttgaagcctgggaacatattgtgcacattgaatggctgtttgaagatctgcgattttggtctcgctaggggtattcatgccggatttttcaagtgtcattccactgtgcagccccatataaccaactacgttgctacaagatggtatagggcgcctgagctgcttctttccaaccaaccgtatagtaagtccgtagacatatgggctgtagggtgcattcttgcagaattctatgctcgaaagcctgttttcatggggcgtgactccatgcaccagatatttgaaatcatcaaagtcttgggtactcctgataaagatattctgatcaagtttggcaccattaaagcttggaatctaggcaaaaacagtaataaccctgtatataaaaaaatcccatggtccaacattttcccctttgcctcgcatgaagcaatcaatctcatagagtcattacttcattgggactcaacacataggttaaacgtggaacaagctatatcacatccgttcctaaacgaggtgcggaagccagacgacgagcctgtttgccttcagggtcctttcgacttcacctatgaatccgagttgaattcaatgtccaaattaagagactacttggttgaagaagtgaaaaatttcaaaaccgatttgtcctcctcgtctttatag

SEQ ID NO: 11534 - DNA, 1167 bp, Artificial Sequence
  Description of Artificial Sequence: Synthetic polynucleotide
atgaattgcacacttacagataataccagagccataaatgtggcctccaacctcggtgctcctcaacagaggacgatttttgccaaggagagaatatccatcccaggatactacgagataatccaattcttgggcaagggagcctatgggacagtgtgctctgtgaagtttaagggtagaagcccagctgctaggatagcggtaaagaagatcagcaacatctttaataaggagatccttttgaaaagggccatccgtgagttgaaattcatgaacttcttcaagggccataaaaatattgtaaatttgatcgatttagagatagtgaccagctctccctatgacggattgtattgctaccaggaattgattgattatgatttggcaaaagtcatacattcttccgtgcagctcagtgagtttcatatcaaatactttctttaccaaatcttgtgtgggttgaagtacatacacagtgcagatgtcatccacagagatttgaagcctgggaacatattgtgcacattgaatggctgtttgaagatctgcgattttggtctcgctaggggtattcatgccggatttttcaagtgtcattccactgtgcagccccatataaccaactacgttgctacaagatggtatagggcgcctgagttgcttctttccaaccaaccgtatagtaagtccgtagacatatgggctgtagggtgcattcttgcagaattctatgctagaaagcctgttttcatggggcgtgactccatgcaccagatatttgaaatcatcaaagtcttgggtactcctgataaagatattttgatcaagtttggcaccattaaagcttggaatttgggcaaaaacagtaataaccctgtatataaaaaaatcccatggtccaacattttcccctttgcctctcatgaagcaatcaatctcatagagtctttacttcattgggactctacacataggttaaacgtggaacaagctatatctcatccgttcttgaacgaggtgagaaagccagacgacgagcctgtttgccttcagggtcctttcgacttcacctatgaatccgagttgaattctatgtccaaattaagagactacttggttgaagaagtgaaaaatttcaaaaccgatttgtcctcctcttctttatga

SEQ ID NO: 11535 - DNA, 3198 bp, Saccharomyces cerevisiae
atggattacctaaaaccagcgcagaaggggagaagacgtggtctttccataaacagtctttcggagactcagcaatctgctatgaatagttccctggaccatcttcagaatgacttaaacaggataaatcttcaatggaatagaatactgtcggataacactaatcccttagaactagcgctcgcatttttggatgatacatctgtaggtctgggccaccggtatgaagaattcaatcaattaaagtcacaaattggtagtcacttacaagatgttgttaatgaacatagccaagtgttcaacactaatgtggcttcttacggaaaagcagtcagttcgatcatgcaggcccaagaacagactttaaatctgaaaaattgtttaaaggaagctaatgagaaaatcaccactgataaaggttctttacaggaattaaatgataataacttgaagtatacaaaaatgattgatgttttagtcaatattgaggagttattacagatacccgaaaaaattgaggagaacattagaaaggaaaatttccatcaggtgcaaattctcctagaaaggggtttcatattaatgaacaacaaatctttgaagacagtggagattttaaagcctataaaccaacaacttgagttacaagaacatttacttttcaacaatctgattgaagaaattcacgacattatgtactccaaatctaacaaaacaaattttactcgagtaaccaataatgatatattcaaaatcataagcatttcacataatggatttacgagtttagaaaattacctgtacaacatagtcaatattgatattatggaacactcaaaaacgataaacaagaaccttgaacaattcattcatgaccaatcgttaaataaaggaaatatcatgctacaagaaaatgctgcgactcaagcaccattggcaccatctagaaaccaagaaaacgaaggatttaacagaatagggttcctactaaaaaccataaataacatcaataaattacctgttgcattcaatataataacagaaagggctaaagaggagattcataatataattgttaaaagtaccgaatcaatacgttcgaagcacccttctctgcttaaaatggctactagtttaaagaatgacaaccattttggcctacccgtacaggatatactatcgatcattttaagggaatgcttttgggaaatatttttgaaattactgtatgctattcagtgccatagggctatttttgaaatgtcaaacattttgcagccaacgtcttccgcaaagccagctttcaagttcaataaaatttggggcaaactgttagatgaaatagaattattacttgtgaggtacatcaatgaccctgaattgatatccagcaataacggtagtattaaaccaattaatggcgcgacaaataacgcacccactttacctaaaaggaaaaatcctaaaattttttctttggagtataacattgaggacaattcttctgtaaaggatcaagcttttgaactaaaggctttgttgaaagatatattccctggattttctgtctcctcaaacatggatttagactctatttatgtaaaagatgaatccttcgaacaagatgagcctctagtccctccttctgttttcaacatgaaggtaattttagatccgtttttgctgtttacgcaatcgacatctacaattgttcccagtgtcttaacacaaaatactatttcatccctaacctttttcgatgattatatgaataaaagttttctcccaaagattcagatgactatggattatttattcacggttgaagtagaatccaataatccgtacgccttagagctatccgatgaaaatcataacatttttaaaacagcattagattttcaaaggttattttacaatttattgaatgttttcaacacagcaaacacatttagagaaaaaatatcgtactgcattctagatcttttgaatcatttttataattactacttggggctatttaattccttgattggtacttctgatagacatttaactaggaaaataattacggcatggttgcagaatggtattttgatggatcaagaacaaaaaattctgaatggggatgagacactctttcatgaagaatccatagagttatttaaggaaatacctcatttctatcaagcgggtaaaggtttgagcaaatctgatttattcaataacttgacattggacacaattctgcagttttcggcaagcgtgttatggatattaaactggctgccaggcttaaaaaaggctatcaatattgatgaagtaagccaagaacccatgttagatgctgatagattaaggagcagctggacattttctgaatcaatggatttaaactattcgaaccctagttccagcccaaattcattaggaaatctaaaaattttattggatgataaagcctccaaaaaatttgatgagactatcgacggattcaaaaccttgaaattcaaactaatcactatactgaggttcaacattagggccttgtgtatatacgacatcgggtctttttttcaaaacaccaaaatttggaatatggatgtgggtagtattgaattagatcaaaatatagcttctctaatttccgaattaagaaggactgaaagcaaattgaaacaacagttaccagaaaaggaaaaaaactccatatttattggtcttgatatagtcaacaactacgccttgattaagggtgccaaatccataaaagttttgaaccataacgggataaagaaaatgttgagaaatgtaaatgtcttacaacatgcctatagaaatctttcttctgaaccatcaaaaattaatatgaacgtcacaatgaatttttactctttatgcggctccagtgaagctgaactatttgaatatataaaagacaatgaattaccgcattgttctgtcgaagatttgaaaaccatattgaggctgcagtttagcgaggaaatgcatcgtcaattgaagagacaaagcactagctcaactaagggttccataaaaccttccaataagaggtacactgaagctttggagaaactaagtaacctcgaaaaagagcagtcgaaagaaggagcccgcaccaagattggaaaacttaaaagcaaattgaatgctgtccatactgcaaacgaaaaatga

SEQ ID NO: 11536 - DNA, 3198 bp, Artificial Sequence
  Description of Artificial Sequence: Synthetic polynucleotide
atggattacttgaaaccagcgcagaaggggagaagacgtggtctttccataaacagtctttctgagactcagcaatctgctatgaatagttccttggaccatcttcagaatgacttaaacaggataaatcttcaatggaatagaatattaagtgataacactaatcccttagaattggcgctcgcatttttggatgatacatctgtaggtcttggccacagatatgaagaattcaatcaattaaagtctcaaattggtagtcacttacaagatgttgttaatgaacatagccaagtgttcaacactaatgtggcttcttacggaaaagcagtcagttctatcatgcaggcccaagaacagactttaaatttgaaaaattgtttaaaggaagctaatgagaaaatcaccactgataaaggttctttacaggaattaaatgataataacttgaagtatacaaaaatgattgatgttttagtcaatattgaggagttattacagatacccgaaaaaattgaggagaacattagaaaggaaaatttccatcaggtgcaaattctcttggaaaggggtttcatattaatgaacaacaaatctttgaagacagtggagattttaaagcctataaaccaacaacttgagttacaagaacatttacttttcaacaatttaattgaagaaattcacgacattatgtactccaaatctaacaaaacaaattttactagagtaaccaataatgatatattcaaaatcataagcatttctcataatggatttacgagtttagaaaattacttgtacaacatagtcaatattgatattatggaacactctaaaacgataaacaagaaccttgaacaattcattcatgaccaatctttaaataaaggaaatatcatgttacaagaaaatgctgcgactcaagcaccattggcaccatctagaaaccaagaaaacgaaggatttaacagaatagggttcttattgaaaaccataaataacatcaataaattacctgttgcattcaatataataacagaaagggctaaagaggagattcataatataattgttaaaagtaccgaaagtatacgttccaagcacccttctttacttaaaatggctactagtttaaagaatgacaaccattttggcttgcccgtacaggatatattatctatcattttaagggaatgcttttgggaaatatttttgaaattattatatgctattcagtgccatagggctatttttgaaatgtccaacattttgcagccaacgtcttccgcaaagccagctttcaagttcaataaaatttggggcaaattattagatgaaatagaattattacttgtgaggtacatcaatgaccctgaattgatatccagcaataacggtagtattaaaccaattaatggcgcgacaaataacgcacccactttacctaaaaggaaaaatcctaaaattttttctttggagtataacattgaggacaattcttctgtaaaggatcaagcttttgaattgaaggctttgttgaaagatatattccctggattttctgtctccagtaacatggatttagactctatttatgtaaaagatgaatccttcgaacaagatgagcctttggtccctccttctgttttcaacatgaaggtaattttagatccgtttttgttatttacgcaaagtacatctacaattgttcccagtgtcttaacacaaaatactatttcttccttgacctttttcgatgattatatgaataaaagttttctcccaaagattcagatgactatggattatttattcacggttgaagtagaatccaataatccgtacgccttagagctttccgatgaaaatcataacatttttaaaacagcattagattttcaaaggttattttacaatttattgaatgttttcaacacagcaaacacatttagagaaaaaatatcttactgcattttagatcttttgaatcatttttataattactacttggggttgtttaattccttgattggtacttctgatagacatttaactaggaaaataattacggcatggttgcagaatggtattttgatggatcaagaacaaaaaattttgaatggggatgagacactctttcatgaagaatccatagagttatttaaggaaatacctcatttctatcaagcgggtaaaggtttgagcaaatctgatttattcaataacttgacattggacacaattttacagttttctgcaagcgtgttatggatattaaactggttaccaggcttaaaaaaggctatcaatattgatgaagtaagccaagaacccatgttagatgctgatagattaaggagcagctggacattttctgaaagtatggatttaaactattccaaccctagttccagcccaaattctttaggaaatttgaaaattttattggatgataaagcctccaaaaaatttgatgagactatcgacggattcaaaaccttgaaattcaaattaatcactatattaaggttcaacattagggccttgtgtatatacgacatcgggtctttttttcaaaacaccaaaatttggaatatggatgtgggtagtattgaattagatcaaaatatagcttctttgatttccgaattaagaaggactgaaagcaaattgaaacaacagttaccagaaaaggaaaaaaactccatatttattggtcttgatatagtcaacaactacgccttgattaagggtgccaaatccataaaagttttgaaccataacgggataaagaaaatgttgagaaatgtaaatgtcttacaacatgcctatagaaatctttcttctgaaccatctaaaattaatatgaacgtcacaatgaatttttactctttatgcggctccagtgaagctgaattatttgaatatataaaagacaatgaattaccgcattgttctgtcgaagatttgaaaaccatattgaggttacagtttagcgaggaaatgcatcgtcaattgaagagacaaagcactagctctactaagggttccataaaaccttccaataagaggtacactgaagctttggagaaattaagtaacctcgaaaaagagcagtccaaagaaggagcccgcaccaagattggaaaacttaaaagcaaattgaatgctgtccatactgcaaacgaaaaatga

SEQ ID NO: 11537 - DNA, 1017 bp, Saccharomyces cerevisiae
atggatgcaatatctgatccaacgtttaagcatgctagatcaagaaaacaggttactgaagaatcaccatctttgcttaccgttattatagaaattgcaccaaagttatggacaacttttgatgaggaaggaaatgagaaaggaagtataataaaggttttagaggcattgatagtatttctcaatgctcacttagcgttcaatagcgccaacaaagtagcagtcattgctgcatactctcagggaatcaaatatttatacccagagagcacatctgctctaaaagcctctgaatctgaaaataaaacccgtagtgatcttaagattattaactcagatatgtatagacgttttagaaacgttgatgagacgctagtggaagaaatatataaactatttgagttagaaaagaaacaaatcgaacaaaatagtcaaaggagcacgctagcaggtgccatgtcagctgggctgacttatgtaaacagaatatcaaaagagtcagtaactacctcattaaaatcaaggctacttgttcttacgtgcgggagtggcagtagtaaagatgaaattttccaatacatccctataatgaactgtattttttccgcaacaaaaatgaaatgtcccattgatgtcgtaaagattggtggttctaaggaaagcacgtttttacagcaaacgacggatgccacaaatggcgtttatttacatgttgaatctacagaagggctaattcaatatttagcaactgcaatgtttattgatccgtcgttaagacctataattgttaagccaaaccatggatctgtagattttaggacatcatgctatttaacagggagagttgttgccgttggattcatctgttcagtttgcctatgtgtcttatcaatcataccgcccggaaataaatgtcctgcttgtgattctcaatttgatgagcacgtaattgccaagttgaagaggaaaccagttgttccaaggttgaaagccaaaaagaaggtgacgaaaccatga

SEQ ID NO: 11538 - DNA, 1017 bp, Artificial Sequence
  Description of Artificial Sequence: Synthetic polynucleotide
atggatgcaatatctgatccaacgtttaagcatgctagatctagaaaacaggttactgaagaatctccatctttgcttaccgttattatagaaattgcaccaaagttatggacaacttttgatgaggaaggaaatgagaaaggaagtataataaaggttttagaggcattgatagtatttctcaatgctcacttagcgttcaatagcgccaacaaagtagcagtcattgctgcatactctcagggaatcaaatatttatacccagagagcacatctgctttgaaagcctctgaatctgaaaataaaacccgtagtgatcttaagattattaacagtgatatgtatagacgttttagaaacgttgatgagacgttagtggaagaaatatataaattatttgagttagaaaagaaacaaatcgaacaaaatagtcaaaggagcacgttggcaggtgccatgtctgctgggttgacttatgtaaacagaatatccaaagagagtgtaactaccagtttaaaatctaggttacttgttcttacgtgcgggagtggcagtagtaaagatgaaattttccaatacatccctataatgaactgtattttttccgcaacaaaaatgaaatgtcccattgatgtcgtaaagattggtggttctaaggaaagcacgtttttacagcaaacgacggatgccacaaatggcgtttatttacatgttgaatctacagaagggttgattcaatatttagcaactgcaatgtttattgatccgtctttaagacctataattgttaagccaaaccatggatctgtagattttaggacatcctgctatttaacagggagagttgttgccgttggattcatctgttctgtttgcttgtgtgtcttatctatcataccgcccggaaataaatgtcctgcttgtgattctcaatttgatgagcacgtaattgccaagttgaagaggaaaccagttgttccaaggttgaaagccaaaaagaaggtgacgaaaccatga

SEQ ID NO: 11539 - DNA, 1026 bp, Saccharomyces cerevisiae
atgaaaagaggagaaagccaggcgcctgatgccatctttggtcaatctcgtgcatttgcactatctgattcttcagtgaatcctgatgtcattgaatatcttaaaagtgttaggcaagaagcactaagaaccaacgccatatcgattaagaatcatatgaatctgcaaaagaggacgcgtcacaaatcaagcatgtacgatgatgaggatgagggggcccttaaaaggcacgccatctcgccatccttgattaggcttcaaaggaatgtagaaatatgggtaaggtggtttaactctgtgaaggcgacggtgttgactaatgcctacgagtttaccggttatgaggacgaaacactggatcttttattgcttttcttaaagaattatctcgaagatatgcccagcaaatgtactacagttgaaaaaattataagtgtcctaaatcagcattcctttcctgagaaggcagaagagaaggaagaaaatcttcagattgatgaggaatgggcgaagaatattttggtacggctggaaaaaaccaagattgacagtgttgaggatgtaaaaaaagtaatcactgaaggagataaacatgaactagttggatacaaccagtggttccaataccttataaacaatgaaccgcagcatactacttttcatgaaaagattacctctaagcaactttgggttctgatcaagtatatgtcgaatacatggataaaagaaatacacaagaaaggaaggcattatcgtcggctgcaagattggctattctacatactggtacatacacccgaaagagtcacggcagaatatacaagcatcttgagagatcttggaaagaaatgccttgaactgattcaaaagaagccagttgaagcacatgagaataaaataacactcccgaaggagatggcggaattgaatgttgagataccagccgcggtggagaatatgacgataactgagctgacagtgtctgttatagcagtgaactatggtcaaaaagacttgatagaataa

SEQ ID NO: 11540 - DNA, 1026 bp, Artificial Sequence
  Description of Artificial Sequence: Synthetic polynucleotide
atgaaaagaggagaaagccaggcgcctgatgccatctttggtcaatctcgtgcatttgcattatctgattcttctgtgaatcctgatgtcattgaatatcttaaaagtgttaggcaagaagcattgagaaccaacgccatatctattaagaatcatatgaatttacaaaagaggacgcgtcacaaaagtagcatgtacgatgatgaggatgagggggcccttaaaaggcacgccatctctccatccttgattaggcttcaaaggaatgtagaaatatgggtaaggtggtttaactctgtgaaggcgacggtgttgactaatgcctacgagtttaccggttatgaggacgaaacattagatcttttattgcttttcttaaagaattatctcgaagatatgcccagcaaatgtactacagttgaaaaaattataagtgtcttgaatcagcattcctttcctgagaaggcagaagagaaggaagaaaatcttcagattgatgaggaatgggcgaagaatattttggtaaggttagaaaaaaccaagattgacagtgttgaggatgtaaaaaaagtaatcactgaaggagataaacatgaattggttggatacaaccagtggttccaataccttataaacaatgaaccgcagcatactacttttcatgaaaagattacctctaagcaactttgggttttgatcaagtatatgagtaatacatggataaaagaaatacacaagaaaggaaggcattatcgtaggttacaagattggcttttctacatattagtacatacacccgaaagagtcacggcagaatatacaagcatcttgagagatcttggaaagaaatgccttgaattgattcaaaagaagccagttgaagcacatgagaataaaataacactcccgaaggagatggcggaattgaatgttgagataccagccgcggtggagaatatgacgataactgagttgacagtgtctgttatagcagtgaactatggtcaaaaagacttgatagaatga

SEQ ID NO: 11541 - DNA, 924 bp, Saccharomyces cerevisiae
atgtctgaagaatttccatctcctcaactaatcgatgatttggaagaacatccacagcatgataatgctcgagtcgtgaaagatttgcttgcaggtacagcgggtggtattgcgcaagtgctagtgggccagccctttgatacgacaaaagttaggttacaaacatcgagcaccccaacaacagccatggaagtcgtcagaaagctgcttgccaatgaagggcctcgcgggttttacaaaggaactctgacgccattaattggtgttggtgcatgtgtttcattacaatttggtgttaatgaagctatgaagagattttttcatcatcgcaatgctgatatgtcatcgactttgtcattgccacagtattacgcatgtggtgtcacaggcggtatagtaaactcattcttggcgtccccaattgagcatgtcaggattcgcttgcaaacacagactggctcaggcaccaacgcagaattcaagggtcctttggaatgcatcaaaaaattaagacataacaaggccttgctacgtggtttaacacctacaatattgagagaaggtcatggatgtggcacatatttcttagtgtatgaagcgttgattgctaaccaaatgaacaaaagacgtggactagagagaaaggacattcctgcatggaaactttgtatttttggagcattgtctggcactgccttatggttgatggtatatccattagatgtcatcaagtctgtcatgcaaacggataatttacaaaagcctaaatttggtaattctatttccagtgtagccaagactttatatgccaatggagggataggcgcttttttcaaagggtttggtcctaccatgctaagagctgctcccgccaatggtgccacttttgctacttttgaattagcgatgaggttattgggttga

SEQ ID NO: 11542 - DNA, 924 bp, Artificial Sequence
  Description of Artificial Sequence: Synthetic polynucleotide
atgtctgaagaatttccatctcctcaattgatcgatgatttggaagaacatccacagcatgataatgctagagtcgtgaaagatttgcttgcaggtacagcgggtggtattgcgcaagtgttagtgggccagccctttgatacgacaaaagttaggttacaaacatctagcaccccaacaacagccatggaagtcgtcagaaagcttcttgccaatgaagggcctcgcgggttttacaaaggaactttaacgccattaattggtgttggtgcatgtgtttctttacaatttggtgttaatgaagctatgaagagattttttcatcatcgcaatgctgatatgtcttctactttgtctttgccacagtattacgcatgtggtgtcacaggcggtatagtaaactctttcttggcgtccccaattgagcatgtcaggattcgcttgcaaacacagactggcagtggcaccaacgcagaattcaagggtcctttggaatgcatcaaaaaattaagacataacaaggccttgttacgtggtttaacacctacaatattgagagaaggtcatggatgtggcacatatttcttagtgtatgaagcgttgattgctaaccaaatgaacaaaagacgtggattggagagaaaggacattcctgcatggaaactttgtatttttggagcattgtctggcactgccttatggttgatggtatatccattagatgtcatcaagtctgtcatgcaaacggataatttacaaaagcctaaatttggtaattctatttccagtgtagccaagactttatatgccaatggagggataggcgcttttttcaaagggtttggtcctaccatgttgagagctgctcccgccaatggtgccacttttgctacttttgaattagcgatgaggttattgggttga

SEQ ID NO: 11543 - DNA, 771 bp, Saccharomyces cerevisiae
atggatttcacaaaaccagaaactgttttaaatctacaaaatattagagatgaattagttagaatggaggattcgatcatcttcaaatttattgagaggtcgcatttcgccacatgtccttcagtttatgaggcaaaccatccaggtttagaaattccgaattttaaaggatctttcttggattgggctctttcaaatcttgaaattgcgcattctcgcatcagaagattcgaatcacctgatgaaactcccttctttcctgacaagattcagaaatcattcttaccgagcattaactacccacaaattttggcgccttatgccccagaagttaattacaatgataaaataaaaaaagtttatattgaaaagattataccattaatttcgaaaagagatggtgatgataagaataacttcggttctgttgccactagagatatagaatgtttgcaaagcttgagtaggagaatccactttggcaagtttgttgctgaagccaagttccaatcggatatcccgctatacacaaagctgatcaaaagtaaagatgtcgaggggataatgaagaatatcaccaattctgccgttgaagaaaagattctagaaagattaactaagaaggctgaagtctatggtgtggaccctaccaacgagtcaggtgaaagaaggattactccagaatatttggtaaaaatttataaggaaattgttatacctatcactaaggaagttgaggtggaatacttgctaagaaggttggaagagtaa

SEQ ID NO: 11544 - DNA, 771 bp, Artificial Sequence
  Description of Artificial Sequence: Synthetic polynucleotide
atggatttcacaaaaccagaaactgttttaaatttacaaaatattagagatgaattagttagaatggaggattctatcatcttcaaatttattgagaggagccatttcgccacatgtccttctgtttatgaggcaaaccatccaggtttagaaattccgaattttaaaggatctttcttggattgggctctttctaatcttgaaattgcgcattctcgcatcagaagattcgaatctcctgatgaaactcccttctttcctgacaagattcagaaatctttcttaccgagcattaactacccacaaattttggcgccttatgccccagaagttaattacaatgataaaataaaaaaagtttatattgaaaagattataccattaatttccaaaagagatggtgatgataagaataacttcggttctgttgccactagagatatagaatgtttgcaaagcttgagtaggagaatccactttggcaagtttgttgctgaagccaagttccaatctgatatcccgttgtacacaaagttaatcaaaagtaaagatgtcgaggggataatgaagaatatcaccaattctgccgttgaagaaaagattttggaaagattaactaagaaggctgaagtctatggtgtggaccctaccaacgagtctggtgaaagaaggattactccagaatatttggtaaaaatttataaggaaattgttatacctatcactaaggaagttgaggtggaatacttgttaagaaggttggaagagtga

SEQ ID NO: 11545 - DNA, 906 bp, Saccharomyces cerevisiae
atgctacaccataagttcgtatacccatttttattcaagtggcacttatcatgtgtagaaaagtgtcccccacaaatcacttttatagctaagtatgctacagcgaacgataaaaatggcaatagaaaacttacgataagggatgaacaatggcctgagttggcagatccaactccctatgatatttttggcattccaaaggccggatctggaaatcctaaactggacaagaagtcgttaaaaaaaaaatatcatcgttatgtaaaattgtaccaccctgaccattccgataacattcaaatatttagctcagaaaaggttaccaacagtgatagtaaatcaccgctgctgctaacatcaagcgaaaaactacatagatttaaagtcatctctcaagcatatgatattctttgtgacccaaagaaaaagatcgtatatgacacaacgaggcaaggctggaccacatcgtattcaccacgttctaacgttaatactgaaaattaccaatatgccggctcttatggctaccactctaacgcgcagtatgaatactggaacgctgggacttgggaagacgcaaatagcatgaaaaacgaaagaattcaagaaaacatcaacccatggaccgttattggcataatttgtggcctagctatatgcatcgaagggactgcgttgttagccaaaatccaggagtctctgagcaaggccgaatttactcatgacgaaagtggattacatttgattcagtcatacacgaattatggtcttgatactgacaaattttccagattgaggcggttcttatggtttagaacttggggactttacaagtcgaaagaggatttagatagagaagccaagatcaatgaagaaatgatacgcaaactgaaagcagctaaatga

SEQ ID NO: 11546 - DNA, 906 bp, Artificial Sequence
  Description of Artificial Sequence: Synthetic polynucleotide
atgttgcaccataagttcgtatacccatttttattcaagtggcacttaagttgtgtagaaaagtgtcccccacaaatcacttttatagctaagtatgctacagcgaacgataaaaatggcaatagaaaacttacgataagggatgaacaatggcctgagttggcagatccaactccctatgatatttttggcattccaaaggccggatctggaaatcctaaattagacaagaagtctttaaaaaaaaaatatcatcgttatgtaaaattgtaccaccctgaccattccgataacattcaaatatttagctctgaaaaggttaccaacagtgatagtaaatctccgttattattaacatctagcgaaaaattgcatagatttaaagtcatctctcaagcatatgatattctttgtgacccaaagaaaaagatcgtatatgacacaacgaggcaaggctggaccacatcttattctccacgttctaacgttaatactgaaaattaccaatatgccggctcttatggctaccactctaacgcgcagtatgaatactggaacgctgggacttgggaagacgcaaatagcatgaaaaacgaaagaattcaagaaaacatcaacccatggaccgttattggcataatttgtggcttagctatatgcatcgaagggactgcgttgttagccaaaatccaggagtctttaagcaaggccgaatttactcatgacgaaagtggattacatttgattcagtcttacacgaattatggtcttgatactgacaaattttccagattgaggagattcttatggtttagaacttggggactttacaagagtaaagaggatttagatagagaagccaagatcaatgaagaaatgatacgcaaattgaaagcagctaaatga

SEQ ID NO: 11547 - DNA, 477 bp, Saccharomyces cerevisiae
atggtgacagggggaatggcaagcaagtgggatcagaagggtatggacattgcctatgaggaggcggccttaggttacaaagagggtggtgttcctattggcggatgtcttatcaataacaaagacggaagtgttctcggtcgtggtcacaacatgagatttcaaaagggatccgccacactacatggtgagatctccactttggaaaactgtgggagattagagggcaaagtgtacaaagataccactttgtatacgacgctgtctccatgcgacatgtgtacaggtgccatcatcatgtatggtattccacgctgtgttgtcggtgagaacgttaatttcaaaagtaagggcgagaaatatttacaaactagaggtcacgaggttgttgttgttgacgatgagaggtgtaaaaagatcatgaaacaatttatcgatgaaagacctcaggattggtttgaagatattggtgagtag

SEQ ID NO: 11548 - DNA, 477 bp, Artificial Sequence
  Description of Artificial Sequence: Synthetic polynucleotide
atggtgacagggggaatggcaagcaagtgggatcagaagggtatggacattgcctatgaggaggcggccttaggttacaaagagggtggtgttcctattggcggatgtcttatcaataacaaagacggaagtgttctcggtcgtggtcacaacatgagatttcaaaagggatccgccacattgcatggtgagatctccactttggaaaactgtgggagattagagggcaaagtgtacaaagataccactttgtatacgacgttgtctccatgcgacatgtgtacaggtgccatcatcatgtatggtattccacgctgtgttgtcggtgagaacgttaatttcaaaagtaagggcgagaaatatttacaaactagaggtcacgaggttgttgttgttgacgatgagaggtgtaaaaagatcatgaaacaatttatcgatgaaagacctcaggattggtttgaagatattggtgagtga

SEQ ID NO: 11549 - DNA, 423 bp, Saccharomyces cerevisiae
atgactttgaataacgttgcaaggcccgacctttgtgtttcgtacaagaaaattgcgccaccaaaaggactatattctgccacaccaagcatatctggtgtggttaaccaatccatgcctatggccgctattttcttgaggaacaagttcattgcctggttctccctgattcagagtgtacactactacctgaacaccgacgaagacatcatcgttgcctataaggaaaataaggcaccatctccaatggaccagcctcctgcaatcaagctattcatgagtttaatcgggttatgcgtgtgttacatgaacttagttttccctcaacaaatagctcaaccatcgtctagcggctctaaaggtaatactgaaacgacaattgagacaactaccgaagtagagacggaaacagctaagcagtag

SEQ ID NO: 11550 - DNA, 423 bp, Artificial Sequence
  Description of Artificial Sequence: Synthetic polynucleotide
atgactttgaataacgttgcaaggcccgacctttgtgtttcttacaagaaaattgcgccaccaaaaggattgtattctgccacaccaagcatatctggtgtggttaaccaatccatgcctatggccgctattttcttgaggaacaagttcattgcctggttctccttgattcagagtgtacactactacttgaacaccgacgaagacatcatcgttgcctataaggaaaataaggcaccatctccaatggaccagcctcctgcaatcaagcttttcatgagtttaatcgggttatgcgtgtgttacatgaacttagttttccctcaacaaatagctcaaccatcttctagcggctctaaaggtaatactgaaacgacaattgagacaactaccgaagtagagacggaaacagctaagcagtga

SEQ ID NO: 11551 - DNA, 420 bp, Saccharomyces cerevisiae
atgaagtcatgtgtgcttagcaattacgtagagggattagaaataatagtgtgcggttatcggaaccggctcttgttcccgtttagagcaacccaggtgcaggcgtactttaaagtattttctttcttttttttcctgctacttacgctaggagctgccgcagctgcaaagccgacgtcggagaggcaggtgatcttcggctcggccgacaaatcccctggatatcattggcctgtcgaggtatcggccgcgtggaactaccgggaattactatgcaaaacaattggaaatctggtaggaaaaccttgttctagaacttggcgattgctgacaaagaagaaaagggcctattgttgctgcctcttttgttgttcttcctcgtattgtcttgccggtgttctttgtgtcttttgtgtgtag

SEQ ID NO: 11552 - DNA, 420 bp, Artificial Sequence
  Description of Artificial Sequence: Synthetic polynucleotide
atgaagagttgtgtgcttagcaattacgtagagggattagaaataatagtgtgcggttatagaaacagactcttgttcccgtttagagcaacccaggtgcaggcgtactttaaagtattttctttcttttttttcttattacttacgttgggagctgccgcagctgcaaagccgacgagtgagaggcaggtgatcttcggctctgccgacaaatcccctggatatcattggcctgtcgaggtatctgccgcgtggaactacagagaattattatgcaaaacaattggaaatttggtaggaaaaccttgttctagaacttggagattgttgacaaagaagaaaagggcctattgttgctgcctcttttgttgttcttccagctattgtcttgccggtgttctttgtgtcttttgtgtgtga

SEQ ID NO: 11553 - DNA, 1107 bp, Saccharomyces cerevisiae
atgaatcctaaatcctctacacctaagattccaagacccaagaacgcatttattctgttcagacagcactaccacaggatcttaatagacgaatggaccgctcaaggtgtggaaataccccataattcaaacatttctaaaattattggtacgaagtggaagggcttacaaccggaagataaggcacactgggaaaatctagcggagaaggagaaactagaacatgaaaggaagtatcctgaatacaaatacaagccggtaagaaagtctaagaagaagcaactacttttgaaggaaatcgagcaacagcagcagcaacaacagaaagaacagcagcagcagaaacagtcacaaccgcaattacaacagccctttaacaacaatatagttcttatgaaaagagcacattctctttcaccatcttcctcggtgtcaagctcgaacagctatcagttccaattgaacaatgatcttaagaggttgcctattccttctgttaatacttctaactatatggtctccagatctttaagtggactacctttgacgcatgataagacggcaagagacctaccacagctgtcatctcaactaaattctattccatattactcagctccacacgacccttcaacgagacatcattacctcaacgtcgctcaagctcaaccaagggctaactcgacccctcaattgccctttatttcatccattatcaacaacagcagtcaaacaccggtaactacaactaccacatccacaacaactgcgacatcttctcctgggaaattctcctcttctccgaactcctctgtactggagaacaacagattaaacagtatcaacaattcaaatcaatatttacctccccctctattaccttctctgcaagattttcaactggatcagtaccagcagctaaagcagatgggaccaacttatattgtcaaaccactgtctcacaccaggaacaatctattgtccacaactacccctacgcatcatcacattcctcatataccaaaccaaaacattcctctacatcaaattataaactcaagcaacactgaggtcaccgctaaaactagcctagtttctccgaaatga

SEQ ID NO: 11554 - DNA, 1107 bp, Artificial Sequence
  Description of Artificial Sequence: Synthetic polynucleotide
atgaatcctaaatcctctacacctaagattccaagacccaagaacgcatttattcttttcagacagcactaccacaggatcttaatagacgaatggaccgctcaaggtgtggaaataccccataatagcaacatttctaaaattattggtacgaagtggaagggcttacaaccggaagataaggcacactgggaaaatttggcggagaaggagaaattagaacatgaaaggaagtatcctgaatacaaatacaagccggtaagaaagtctaagaagaagcaattacttttgaaggaaatcgagcaacagcagcagcaacaacagaaagaacagcagcagcagaaacagtctcaaccgcaattacaacagccctttaacaacaatatagttcttatgaaaagagcacattctctttctccatcttcctctgtgagtagcagtaacagctatcagttccaattgaacaatgatcttaagaggttgcctattccttctgttaatacttctaactatatggtctccagatctttaagtggattgcctttgacgcatgataagacggcaagagacttaccacagttatcttctcaattgaattctattccatattactctgctccacacgacccttctacgagacatcattacctcaacgtcgctcaagctcaaccaagggctaactctacccctcaattgccctttatttcttccattatcaacaacagcagtcaaacaccggtaactacaactaccacatccacaacaactgcgacatcttctcctgggaaattctcctcttctccgaactcctctgtattggagaacaacagattaaacagtatcaacaatagtaatcaatatttacctccccctttattaccttctttacaagattttcaattggatcagtaccagcagttgaagcagatgggaccaacttatattgtcaaaccattatctcacaccaggaacaatttattgtccacaactacccctacgcatcatcacattcctcatataccaaaccaaaacattcctttgcatcaaattataaactccagcaacactgaggtcaccgctaaaactagcttagtttctccgaaatga

SEQ ID NO: 11555 - DNA, 900 bp, Saccharomyces cerevisiae
atggactgcaagatattggtgttaggcgcaggtggtctaggatgcgaaatcctgaagaatttgacaatgttaagctttgttaaacaggttcatattgtagatatagacacaatcgagctaaccaaccttaatagacaatttcttttttgtgataaggacataggcaaaccgaaagctcaagtggcagcccagtatgtaaacacgcggttccctcaattggaagttgtggcgcacgtacaggacctgaccactttgcccccgagcttttacaaagacttccagttcataatctcggggctggacgccattgaacctcgtcgcttcatcaatgagactctcgtgaagcttaccttggagtccaattatgaaatttgcatcccgttcatagatggtggaacagaggggctcaagggacatgtaaaaacaatcattccaggcatcactgcatgctgggagtgctccattgataccttgccctcgcagcaggatactgtgccaatgtgtacaatcgccaacaatcctcgctgcattgagcatgttgtggagtatgtctcaactatacaataccctgatttaaatattgagtctacggcggatatggaatttctgctggagaagtgctgcgaaagggctgcccaatttagcatctcaacagaaaaattatcaacaagttttatcctgggtataataaagagtatcatacctagtgtaagcactacgaatgcgatggttgcagcgacatgctgtacgcagatggttaagatttataatgatttaatcgacctggaaaacggcaataatttcactttgattaactgctcagaagggtgttttatgtacagtttcaagttcgagcggttacccgactgtactgtttgttcaaattccaattccaactag

SEQ ID NO: 11556 - DNA, 900 bp, Artificial Sequence
  Description of Artificial Sequence: Synthetic polynucleotide
atggactgcaagatattggtgttaggcgcaggtggtttgggatgcgaaatcttgaagaatttgacaatgttaagctttgttaaacaggttcatattgtagatatagacacaatcgagttgaccaaccttaatagacaatttcttttttgtgataaggacataggcaaaccgaaagctcaagtggcagcccagtatgtaaacacgagattccctcaattggaagttgtggcgcacgtacaggacttgaccactttgcccccgagcttttacaaagacttccagttcataatctctgggttggacgccattgaacctcgtcgcttcatcaatgagactctcgtgaagcttaccttggagtccaattatgaaatttgcatcccgttcatagatggtggaacagaggggctcaagggacatgtaaaaacaatcattccaggcatcactgcatgctgggagtgctccattgataccttgccctctcagcaggatactgtgccaatgtgtacaatcgccaacaatcctcgctgcattgagcatgttgtggagtatgtctctactatacaataccctgatttaaatattgagtctacggcggatatggaatttttattggagaagtgctgcgaaagggctgcccaatttagcatcagtacagaaaaattatctacaagttttatcttgggtataataaagagtatcatacctagtgtaagcactacgaatgcgatggttgcagcgacatgctgtacgcagatggttaagatttataatgatttaatcgacttggaaaacggcaataatttcactttgattaactgcagtgaagggtgttttatgtacagtttcaagttcgagagattacccgactgtactgtttgttctaattccaattccaactga

SEQ ID NO: 11557 - DNA, 558 bp, Saccharomyces cerevisiae
atgcaggctaaattattgtttaccagactaaactttagacgtccctccacaactttacgccagtttcccctaacatgttttttatttcatagcaaagcattttactcggatctggtcactaaggagccgttgatcacaccgaaaagaataataaataagacgcctgggttaaacttatctatttctgagagggcttccaacagactagctgagatctaccgcaatagtaaggaaaatttaagaattagtgtggaaagtggtggatgtcacggtttccagtacaatctaactctagaacccgctaccaagccagatattaagaatgatgtcaaagacaaggagttttcagacgaccttgacgatgatgattccaaggatataatatacgtgttacccgaagataagggtcgagtgataattgatagtaaatcactaaacattttgaataacactacactgacatacactaatgagttgatcggttcttcgttcaaaatcatcaatggtagcctaaaaagtagttgtggttgtggaagtagttttgatattgaaaattaa

SEQ ID NO: 11558 - DNA, 558 bp, Artificial Sequence
  Description of Artificial Sequence: Synthetic polynucleotide
atgcaggctaaattattgtttaccagattgaactttagacgtccctccacaactttacgccagtttcccttgacatgttttttatttcatagcaaagcattttactctgatttggtcactaaggagccgttgatcacaccgaaaagaataataaataagacgcctgggttaaacttatctatttctgagagggcttccaacagattggctgagatctaccgcaatagtaaggaaaatttaagaattagtgtggaaagtggtggatgtcacggtttccagtacaatttaactttggaacccgctaccaagccagatattaagaatgatgtcaaagacaaggagttttctgacgaccttgacgatgatgattccaaggatataatatacgtgttacccgaagataagggtagagtgataattgatagtaaatctttgaacattttgaataacactacattaacatacactaatgagttgatcggttcttctttcaaaatcatcaatggtagcttgaaaagtagttgtggttgtggaagtagttttgatattgaaaattga

SEQ ID NO: 11559 - DNA, 1413 bp, Saccharomyces cerevisiae
atgtcgaaattggtcatatcaacgtcaatatttcagtctcaagtagcagatttactcccatgtaacaatcatcaaaaatcgcagctgacatattccctaataaacgcgtacgatcttctccagcactttgacgaagtgctaacatttccctacgccagaaaggatgatctgctggagttccattcgaaatcatatatcgattatttgataaatggcagattcaataaaatgatggcacaagatgtaaataatcccatggtagagtccaaatggagtgagttgagtgaattggccgataattggaacgaaaaaatcgactacaatccatcgcaagatcttcagagattcaccactagagagaatctctataattattatctgaatcactcacaagcgctcgaaaataatatggactgtattaataacagtgaggtgcccaccaatgataaaccaacagatacttatattttaaattctgaaacaaaacagtataatttagagggagattgcccgattttttcataccttcctatgtactgtcaagttattacaggtgcgactttaaacttgttggatcatctatcgcctacagaacgtcttatcggtataaattgggatggtggaagacatcatgcctttaaacagagggcaagcggattctgctatataaatgacgtggtactgttaatacagagattgcgcaaagcaaagctaaataaaatcacgtacgttgacttcgacttgcatcatggtgacggtgtagaaaaggctttccaatattctaaacaaatacagacaatttcagtacatctctacgagcctggtttttttcctggaactggttctttaagtgattcaagaaaggataagaacgtggttaatattcctttaaagcatggttgtgatgacaactacttggaattgatcgcatccaaaatcgtcaatcctctaatagaaagacacgaacctgaggccttaataattgaatgtggtggtgatgggcttctgggtgatagattcaatgaatggcagctaacaatacgagggctttctcgaatcatcataaatatcatgaaaagttatcctcgagcgcacatattcctacttggagggggtgggtacaacgatttactaatgagtagattttatacgtacttgacttggtgtgttacaaagcagttttccaacttaagatgtggtgacaataattcgttccaaatcgatccatttgatgtctgtgatggtgatgattctgaacaatttatacgtgaacatgatcttgttgaaatgtataatgaagagaactatcagtattggatatatgagatggaaggaagttctcgaatgaaaatgttaaggaatgacaataaggatagagatatggtcgaacttatgaagttttacgaactgtaa

SEQ ID NO: 11560 - DNA, 1413 bp, Artificial Sequence
  Description of Artificial Sequence: Synthetic polynucleotide
atgtccaaattggtcatatctacgtctatatttcagtctcaagtagcagatttactcccatgtaacaatcatcaaaaatctcagttgacatattccttgataaacgcgtacgatcttctccagcactttgacgaagtgttaacatttccctacgccagaaaggatgatttattggagttccattctaaaagttatatcgattatttgataaatggcagattcaataaaatgatggcacaagatgtaaataatcccatggtagagtccaaatggagtgagttgagtgaattggccgataattggaacgaaaaaatcgactacaatccatctcaagatcttcagagattcaccactagagagaatctctataattattatttgaatcactctcaagcgctcgaaaataatatggactgtattaataacagtgaggtgcccaccaatgataaaccaacagatacttatattttaaattctgaaacaaaacagtataatttagagggagattgcccgattttttcttaccttcctatgtactgtcaagttattacaggtgcgactttaaacttgttggatcatttatctcctacagaacgtcttatcggtataaattgggatggtggaagacatcatgcctttaaacagagggcaagcggattctgctatataaatgacgtggtattgttaatacagagattgcgcaaagcaaagttgaataaaatcacgtacgttgacttcgacttgcatcatggtgacggtgtagaaaaggctttccaatattctaaacaaatacagacaattagtgtacatctctacgagcctggtttttttcctggaactggttctttaagtgattccagaaaggataagaacgtggttaatattcctttaaagcatggttgtgatgacaactacttggaattgatcgcatccaaaatcgtcaatcctttgatagaaagacacgaacctgaggccttaataattgaatgtggtggtgatgggcttttgggtgatagattcaatgaatggcagttgacaatacgtgggctttctagaatcatcataaatatcatgaaaagttatcctcgtgcgcacatattcttgcttggagggggtgggtacaacgatttattgatgagtagattttatacgtacttgacttggtgtgttacaaagcagttttccaacttaagatgtggtgacaataattctttccaaatcgatccatttgatgtctgtgatggtgatgattctgaacaatttatacgtgaacatgatcttgttgaaatgtataatgaagagaactatcagtattggatatatgagatggaaggaagttctagaatgaaaatgttaaggaatgacaataaggatagagatatggtcgaacttatgaagttttacgaattatga

SEQ ID NO: 11561 - DNA, 882 bp, Saccharomyces cerevisiae
atggcacaagaaatcactcacccaactattgtagacggctggttcagagaaatttctgataccatgtggccaggccaggccatgactttaaaagtggagaaagttttacaccatgagaagtcaaaatatcaagacgttttgatcttcaaatccactacatatggtaatgttctagttttagataatgtaattcaagccaccgaaagggatgaatttgcctaccaagaaatgattgcccatcttgccttgaattcccatccaaatcctaagaaggttcttgttattggtgggggtgatggtggtgttttgagagaggttgtcaagcatgattccgttgaggaagcctggttatgtgacattgatgaagctgttattagactatcaaaggagtacctaccagaaatggctgcctcttattctcacccaaaggttaagacccacattggtgatggtttccaatttttaagagattaccaaaacacatttgacgtaatcattactgactcttctgacccagaaggtccagctgaaacccttttccaaaaggaatatttccaattgttgaacagtgcgttgacagaaaagggtgtaatcactacacaagcagaaagtatgtggattcacttgccaatcattaaggacttaaagaaagcctgttctgaagttttcccagttgcagaatactctttcgttactattccaacttacccaactggtacgattggttttatggtttgctccaaagataaaacttgcaatgtcaagaagccactacgtgaaatctctgatgagaaggaggctgaattatacagatactataacaagaaaattcacgaagcttcctttgttctaccaacctgggcagccaaggaattaaattag

SEQ ID NO: 11562 - DNA, 882 bp, Artificial Sequence
  Description of Artificial Sequence: Synthetic polynucleotide
atggcacaagaaatcactcacccaactattgtagacggctggttcagagaaatttctgataccatgtggccaggccaggccatgactttaaaagtggagaaagttttacaccatgagaagagtaaatatcaagacgttttgatcttcaaatccactacatatggtaatgttttggttttagataatgtaattcaagccaccgaaagggatgaatttgcctaccaagaaatgattgcccatcttgccttgaattcccatccaaatcctaagaaggttcttgttattggtgggggtgatggtggtgttttgagagaggttgtcaagcatgattccgttgaggaagcctggttatgtgacattgatgaagctgttattagattatccaaggagtacttgccagaaatggctgcctcttattctcacccaaaggttaagacccacattggtgatggtttccaatttttaagagattaccaaaacacatttgacgtaatcattactgactcttctgacccagaaggtccagctgaaacccttttccaaaaggaatatttccaattgttgaacagtgcgttgacagaaaagggtgtaatcactacacaagcagaaagtatgtggattcacttgccaatcattaaggacttaaagaaagcctgttctgaagttttcccagttgcagaatactctttcgttactattccaacttacccaactggtacgattggttttatggtttgctccaaagataaaacttgcaatgtcaagaagccattgcgtgaaatctctgatgagaaggaggctgaattatacagatactataacaagaaaattcacgaagcttcctttgttttgccaacctgggcagccaaggaattaaattga

SEQ ID NO: 11563 - DNA, 1701 bp, Saccharomyces cerevisiae
atggtagaaggagactcttatgtggagactttagactccatgattgaattattcaaggattacaaacctggttccataactttggagaatataacacgactttgtcaaactttgggtctcgagtccttcacagaagaattgagtaatgaactttcaagattatcgacggcatctaaaattatcgtgatagatgttgactacaataagaagcaagacagaattcaggacgttaaactcgtactagcatctaattttgataattttgactactttaaccaacgagatggagagcatgaaaaaagcaacattcttctaaattccttaacaaagtatcctgatttgaaagcttttcataacaatttgaagtttctatatctgttagatgcatattcccacatcgagtccgattctacctcccataataatgggtcttctgacaaaagcttagattcaagcaacgcatcatttaacaaccaaggtaaacttgatctttttaagtatttcacggaactatcacactatataagacaatgtttccaagacaattgttgcgactttaaagtcaggaccaatttgaatgataaatttggaatatatattttaacccagggcatcaatggtaaggaagtgcctttagccaaaatttatttagaagaaaacaaaagcgattcacaatacaggttctatgagtacatatattcacaagaaaccaaatcttggataaatgaatctgctgagaatttttctaacggcatttccttggttatggaaatagtagcaaacgctaaggaaagtaactatacagacttaatttggtttcctgaggatttcatatcaccggaacttattatagataaagttacatgttcatcaaactcatcttcttcgccacctataattgatttattttcgaacaataactacaatagtagaatacaactgatgaacgattttacaacaaaattaatcaatattaaaaaatttgacataagtaatgacaatctagatctaatctctgagatactaaaatgggttcaatggtcgaggatagtacttcaaaatgtttttaaactggtctccacacctagttcaaattcaaattcatcggaacttgaacctgactatcaagctccattctccacctcgactaaagacaaaaattcttcaacatctaacactgagccaattccaagaagtaacagacatggaagtgtagtagaggcctctagaagaaggcgttcttcaactaataaaagcaaacgtcccagtataactgaagcaatgatgcttaaagaagagggtttacagcaatttaatttgcacgaaattttatctgaacccgcaatagaggaggaaaatggagacagcatcaaagagcactctacaactatggatggtgccaatgacctcggattcaccgcctctgtttcgaatcaagaaaatgcaggaactgatattgtgatggaagatcatggtgtactgcaaggcactagtcaaaattatggtactgcaacagcggatgacgcagacatagaaatgaaagacgtcagttctaagcctagtaaacctgaatcgtcggtcttacaactaattgtaagtgaagatcatatcattctcgacactatttcagaatgtaacttgtatgatgatgtaaaatgctggagtaaatttattgaaaaatttcaggatatcgttagctaa

SEQ ID NO: 11564 - DNA, 1701 bp, Artificial Sequence
  Description of Artificial Sequence: Synthetic polynucleotide
atggtagaaggagactcttatgtggagactttagactccatgattgaattattcaaggattacaaacctggttccataactttggagaatataacaagactttgtcaaactttgggtctcgagtccttcacagaagaattgagtaatgaactttctagattatctacggcatctaaaattatcgtgatagatgttgactacaataagaagcaagacagaattcaggacgttaaactcgtattggcatctaattttgataattttgactactttaaccaaagagatggagagcatgaaaaaagcaacattcttttgaattccttaacaaagtatcctgatttgaaagcttttcataacaatttgaagtttttatatcttttagatgcatattcccacatcgagtccgattctacctcccataataatgggtcttctgacaaaagcttagattctagcaacgcaagttttaacaaccaaggtaaacttgatctttttaagtatttcacggaattatcccactatataagacaatgtttccaagacaattgttgcgactttaaagtcaggaccaatttgaatgataaatttggaatatatattttaacccagggcatcaatggtaaggaagtgcctttagccaaaatttatttagaagaaaacaaaagcgattctcaatacaggttctatgagtacatatattctcaagaaaccaaatcttggataaatgaatctgctgagaatttttctaacggcatttccttggttatggaaatagtagcaaacgctaaggaaagtaactatacagacttaatttggtttcctgaggatttcatatctccggaacttattatagataaagttacatgttcttccaactcttcttcttctccacctataattgatttattttccaacaataactacaatagtagaatacaattgatgaacgattttacaacaaaattaatcaatattaaaaaatttgacataagtaatgacaatttggatttgatctctgagatattgaaatgggttcaatggagcaggatagtacttcaaaatgtttttaaattggtctccacacctagtagtaatagtaattcttctgaacttgaacctgactatcaagctccattctccacctctactaaagacaaaaattcttctacatctaacactgagccaattccaagaagtaacagacatggaagtgtagtagaggcctctagaagaaggcgttcttctactaataaaagcaaacgtcccagtataactgaagcaatgatgcttaaagaagagggtttacagcaatttaatttgcacgaaattttatctgaacccgcaatagaggaggaaaatggagacagcatcaaagagcactctacaactatggatggtgccaatgacctcggattcaccgcctctgtttctaatcaagaaaatgcaggaactgatattgtgatggaagatcatggtgtattacaaggcactagtcaaaattatggtactgcaacagcggatgacgcagacatagaaatgaaagacgtcagttctaagcctagtaaacctgaaagttctgtcttacaattgattgtaagtgaagatcatatcattctcgacactatttctgaatgtaacttgtatgatgatgtaaaatgctggagtaaatttattgaaaaatttcaggatatcgttagctga

SEQ ID NO: 11565 - DNA, 636 bp, Saccharomyces cerevisiae
atgcaaaacggcacagaagacaaaagcaatattcctgctcgtagtaatgatgatgtattgccgccgttagccgtcagacttactatgaaagtaatgcgattaattttcatcggaaaaatgtttgcatattcatttgtaccctttcccccatttaaacttttgacatttgataatactgtgggctggttcgtagcatattcagcgatcgtttctatttgggggtttgctgtgtggatggaaagaggatatagacataagattaatctactgcctccaagatgtacgaagataagatgctctcgctgcaatacaagaataagatcccccaattggttcaaatataagaattggttatattttttcctattatacgtttctctaaccacttctaacttaataattcaactggcctcttttatgacagaaatgagtcgtcggggtataagcgttcctggaacgaaggatccaggcaagagagattatttagggcttatcataccaatgcgattcattggtgcatttatccattacatgacggctaatttattcaaagagtattatttacataacggcccactagaaaagaatgatagaccttctaccgatgagaagacatcagagaatgaaacgctatag

SEQ ID NO: 11566 - DNA, 636 bp, Artificial Sequence
  Description of Artificial Sequence: Synthetic polynucleotide
atgcaaaacggcacagaagacaaaagcaatattcctgctcgtagtaatgatgatgtattgccgccgttagccgtcagacttactatgaaagtaatgagattaattttcatcggaaaaatgtttgcatattcttttgtaccctttcccccatttaaacttttgacatttgataatactgtgggctggttcgtagcatattctgcgatcgtttctatttgggggtttgctgtgtggatggaaagaggatatagacataagattaatttattgcctccaagatgtacgaagataagatgctctcgctgcaatacaagaataagatcccccaattggttcaaatataagaattggttatattttttcttattatacgtttctttaaccacttctaacttaataattcaattggcctcttttatgacagaaatgagtcgtcgtggtataagcgttcctggaacgaaggatccaggcaagagagattatttagggcttatcataccaatgagattcattggtgcatttatccattacatgacggctaatttattcaaagagtattatttacataacggcccattggaaaagaatgatagaccttctaccgatgagaagacaagtgagaatgaaacgttgtga

SEQ ID NO: 11567 - DNA, 1683 bp, Saccharomyces cerevisiae
atgtctcaaagaaagctacaacaggatatcgataagcttttgaagaaggtgaaggaaggtattgaagacttcgatgacatatacgaaaaatttcagtcaacagacccctccaattcttcgcatagagaaaaactggaatctgacttaaaaagagaaatcaagaagctgcaaaaacatagggatcaaataaaaacatggctcagcaaagaagatgtaaaggataagcaaagtgttctgatgactaataggaggttgattgaaaatggcatggaaagatttaagtccgtggagaagctaatgaagacaaaacagttttcaaaggaggctttaacaaatccagatataatcaaagaccctaaagaactcaaaaaaagagatcaggtcttatttattcacgattgtttagatgagctacaaaagcaattggaacagtatgaggctcaagaaaatgaagaacaaacagaaagacacgaatttcacatcgccaacctagagaatatcttgaaaaaacttcagaataatgaaatggacccagagcccgtagaagaattccaagacgatataaagtactatgtagaaaataacgatgatcccgatttcattgaatacgatacaatttatgaggacatgggttgcgaaatacaaccttcatcaagtaataatgaggctccaaaagaaggaaacaatcaaacttctttatctagcattcgctcatcaaaaaaacaagaacgttctccaaagaaaaaagctccgcagagggatgtttctatatcagacagggcgacgactccaatcgcgccaggtgtagaatcagcctcgcaatctatatcttctacgccaacacctgtgtcaactgatacgccattgcatacagtgaaagatgattcaataaaattcgataattctacccttggtacaccaactacacatgtgtctatgaaaaagaaggaatcggaaaacgactcggagcaacaactaaatttcccaccggatagaactgatgaaattcgaaaaaccatccagcacgatgtagagacgaatgcagcttttcaaaatcccttattcaacgacgaattaaaatactggttagactcgaaaaggtacttaatgcaacctcttcaagaaatgtcaccaaagatggtatcgcaattagaatcttcgctattgaattgtccagattctctagatgccgattcgccatgtctatacaccaaaccattatctttgcctcacccaacgtcaatcttttttcccaatgaaccaattcgatttgtttatccgtacgatgtacctttaaatttaacgaataatgaaaatgatactgacaataagttcggtaaagatagtaaagcaaaatctaagaaagatgatgatatctattccagaacctcactagccagaatatttatgaaatttgatcttgatactttatttttcatattctatcattaccaaggatcatatgaacagtttttagctgctagagaactttttaaaaatagaaactggctattcaacaaggtagatcgctgctggtattataaagaaatcgaaaagttaccaccaggaatgggcaaatctgaggaggaatcatggagatactttgattataaaaaaagttggttagcgagacgttgcggtaacgacttcgtatataatgaagaagatttcgaaaaactgtaa

SEQ ID NO: 11568 - DNA, 1683 bp, Artificial Sequence
  Description of Artificial Sequence: Synthetic polynucleotide
atgtctcaaagaaagttacaacaggatatcgataagcttttgaagaaggtgaaggaaggtattgaagacttcgatgacatatacgaaaaatttcagagtacagacccctccaattcttctcatagagaaaaattagaatctgacttaaaaagagaaatcaagaagttacaaaaacatagggatcaaataaaaacatggctcagcaaagaagatgtaaaggataagcaaagtgttttgatgactaataggaggttgattgaaaatggcatggaaagatttaagtccgtggagaagttgatgaagacaaaacagttttccaaggaggctttaacaaatccagatataatcaaagaccctaaagaactcaaaaaaagagatcaggtcttatttattcacgattgtttagatgagttacaaaagcaattggaacagtatgaggctcaagaaaatgaagaacaaacagaaagacacgaatttcacatcgccaacttggagaatatcttgaaaaaacttcagaataatgaaatggacccagagcccgtagaagaattccaagacgatataaagtactatgtagaaaataacgatgatcccgatttcattgaatacgatacaatttatgaggacatgggttgcgaaatacaaccttcttccagtaataatgaggctccaaaagaaggaaacaatcaaacttctttatctagcattcgctcttctaaaaaacaagaacgttctccaaagaaaaaagctccgcagagggatgtttctatatctgacagggcgacgactccaatcgcgccaggtgtagaaagtgcctctcaatctatatcttctacgccaacacctgtgtccactgatacgccattgcatacagtgaaagatgattctataaaattcgataattctacccttggtacaccaactacacatgtgtctatgaaaaagaaggaaagtgaaaacgactctgagcaacaattgaatttcccaccggatagaactgatgaaattagaaaaaccatccagcacgatgtagagacgaatgcagcttttcaaaatcccttattcaacgacgaattaaaatactggttagactctaaaaggtacttaatgcaacctcttcaagaaatgtctccaaagatggtatctcaattagaatcttctttgttgaattgtccagattctttagatgccgattctccatgtctttacaccaaaccattatctttgcctcacccaacgtccatcttttttcccaatgaaccaattagatttgtttatccgtacgatgtacctttaaatttaacgaataatgaaaatgatactgacaataagttcggtaaagatagtaaagcaaaatctaagaaagatgatgatatctattccagaacctctttggccagaatatttatgaaatttgatcttgatactttatttttcatattctatcattaccaaggatcctatgaacagtttttagctgctagagaactttttaaaaatagaaactggcttttcaacaaggtagatcgctgctggtattataaagaaatcgaaaagttaccaccaggaatgggcaaatctgaggaggaaagttggagatactttgattataaaaaaagttggttagcgagacgttgcggtaacgacttcgtatataatgaagaagatttcgaaaaattgtga

SEQ ID NO: 11569 - DNA, 486 bp, Saccharomyces cerevisiae
atgacaattgaaaaaccaaaaatatcggtcgcattcatttgtttgggtaacttctgtagatcaccaatggcggaagccattttcaaacatgaagtcgaaaaggctaatctagaaaatcgattcaacaagattgattcatttggcacttctaattatcatgtgggggaaagccctgatcatcgtacagtgtccatttgtaagcaacatggcgtcaagattaatcataaagggaaacaaataaagaccaaacacttcgatgaatatgactatataatcggtatggatgaatccaacattaataacctaaaaaaaatacaacctgaaggttctaaagctaaagtttgcctttttggtgattggaatactaatgatggcactgtgcagaccattattgaagatccttggtatggtgacatacaagatttcgagtacaacttcaaacaaatcacctatttctccaaacagtttttaaaaaaagagttataa

SEQ ID NO: 11570 - DNA, 486 bp, Artificial Sequence
  Description of Artificial Sequence: Synthetic polynucleotide
atgacaattgaaaaaccaaaaatatctgtcgcattcatttgtttgggtaacttctgtagatctccaatggcggaagccattttcaaacatgaagtcgaaaaggctaatttggaaaatagattcaacaagattgattcttttggcacttctaattatcatgtgggggaaagccctgatcatcgtacagtgtccatttgtaagcaacatggcgtcaagattaatcataaagggaaacaaataaagaccaaacacttcgatgaatatgactatataatcggtatggatgaatccaacattaataacttgaaaaaaatacaacctgaaggttctaaagctaaagtttgcctttttggtgattggaatactaatgatggcactgtgcagaccattattgaagatccttggtatggtgacatacaagatttcgagtacaacttcaaacaaatcacctatttctccaaacagtttttaaaaaaagagttatga

SEQ ID NO: 11571 - DNA, 2043 bp, Saccharomyces cerevisiae
atgactcaattcactgacattgataagctagccgtctccaccataagaattttggctgtggacaccgtatccaaggccaactcaggtcacccaggtgctccattgggtatggcaccagctgcacacgttctatggagtcaaatgcgcatgaacccaaccaacccagactggatcaacagagatagatttgtcttgtctaacggtcacgcggtcgctttgttgtattctatgctacatttgactggttacgatctgtctattgaagacttgaaacagttcagacagttgggttccagaacaccaggtcatcctgaatttgagttgccaggtgttgaagttactaccggtccattaggtcaaggtatctccaacgctgttggtatggccatggctcaagctaacctggctgccacttacaacaagccgggctttaccttgtctgacaactacacctatgttttcttgggtgacggttgtttgcaagaaggtatttcttcagaagcttcctccttggctggtcatttgaaattgggtaacttgattgccatctacgatgacaacaagatcactatcgatggtgctaccagtatctcattcgatgaagatgttgctaagagatacgaagcctacggttgggaagttttgtacgtagaaaatggtaacgaagatctagccggtattgccaaggctattgctcaagctaagttatccaaggacaaaccaactttgatcaaaatgaccacaaccattggttacggttccttgcatgccggctctcactctgtgcacggtgccccattgaaagcagatgatgttaaacaactaaagagcaaattcggtttcaacccagacaagtcctttgttgttccacaagaagtttacgaccactaccaaaagacaattttaaagccaggtgtcgaagccaacaacaagtggaacaagttgttcagcgaataccaaaagaaattcccagaattaggtgctgaattggctagaagattgagcggccaactacccgcaaattgggaatctaagttgccaacttacaccgccaaggactctgccgtggccactagaaaattatcagaaactgttcttgaggatgtttacaatcaattgccagagttgattggtggttctgccgatttaacaccttctaacttgaccagatggaaggaagcccttgacttccaacctccttcttccggttcaggtaactactctggtagatacattaggtacggtattagagaacacgctatgggtgccataatgaacggtatttcagctttcggtgccaactacaaaccatacggtggtactttcttgaacttcgtttcttatgctgctggtgccgttagattgtccgctttgtctggccacccagttatttgggttgctacacatgactctatcggtgtcggtgaagatggtccaacacatcaacctattgaaactttagcacacttcagatccctaccaaacattcaagtttggagaccagctgatggtaacgaagtttctgccgcctacaagaactctttagaatccaagcatactccaagtatcattgctttgtccagacaaaacttgccacaattggaaggtagctctattgaaagcgcttctaagggtggttacgtactacaagatgttgctaacccagatattattttagtggctactggttccgaagtgtctttgagtgttgaagctgctaagactttggccgcaaagaacatcaaggctcgtgttgtttctctaccagatttcttcacttttgacaaacaacccctagaatacagactatcagtcttaccagacaacgttccaatcatgtctgttgaagttttggctaccacatgttggggcaaatacgctcatcaatccttcggtattgacagatttggtgcctccggtaaggcaccagaagtcttcaagttcttcggtttcaccccagaaggtgttgctgaaagagctcaaaagaccattgcattctataagggtgacaagctaatttctcctttgaaaaaagctttctaa

SEQ ID NO: 11572 - DNA, 2043 bp, Artificial Sequence
  Description of Artificial Sequence: Synthetic polynucleotide
atgactcaattcactgacattgataagttggccgtctccaccataagaattttggctgtggacaccgtatccaaggccaacagtggtcacccaggtgctccattgggtatggcaccagctgcacacgttttatggagtcaaatgcgcatgaacccaaccaacccagactggatcaacagagatagatttgtcttgtctaacggtcacgcggtcgctttgttgtattctatgttgcatttgactggttacgatttatctattgaagacttgaaacagttcagacagttgggttccagaacaccaggtcatcctgaatttgagttgccaggtgttgaagttactaccggtccattaggtcaaggtatctccaacgctgttggtatggccatggctcaagctaacttggctgccacttacaacaagccgggctttaccttgtctgacaactacacctatgttttcttgggtgacggttgtttgcaagaaggtatttcttctgaagcttcctccttggctggtcatttgaaattgggtaacttgattgccatctacgatgacaacaagatcactatcgatggtgctaccagtatctctttcgatgaagatgttgctaagagatacgaagcctacggttgggaagttttgtacgtagaaaatggtaacgaagatttggccggtattgccaaggctattgctcaagctaagttatccaaggacaaaccaactttgatcaaaatgaccacaaccattggttacggttccttgcatgccggctctcactctgtgcacggtgccccattgaaagcagatgatgttaaacaattgaagagcaaattcggtttcaacccagacaagtcctttgttgttccacaagaagtttacgaccactaccaaaagacaattttaaagccaggtgtcgaagccaacaacaagtggaacaagttgttcagcgaataccaaaagaaattcccagaattaggtgctgaattggctagaagattgagcggccaattgcccgcaaattgggaatctaagttgccaacttacaccgccaaggactctgccgtggccactagaaaattatctgaaactgttcttgaggatgtttacaatcaattgccagagttgattggtggttctgccgatttaacaccttctaacttgaccagatggaaggaagcccttgacttccaacctccttcttccggttctggtaactactctggtagatacattaggtacggtattagagaacacgctatgggtgccataatgaacggtatttctgctttcggtgccaactacaaaccatacggtggtactttcttgaacttcgtttcttatgctgctggtgccgttagattgtccgctttgtctggccacccagttatttgggttgctacacatgactctatcggtgtcggtgaagatggtccaacacatcaacctattgaaactttagcacacttcagatccttgccaaacattcaagtttggagaccagctgatggtaacgaagtttctgccgcctacaagaactctttagaatccaagcatactccaagtatcattgctttgtccagacaaaacttgccacaattggaaggtagctctattgaaagcgcttctaagggtggttacgtattacaagatgttgctaacccagatattattttagtggctactggttccgaagtgtctttgagtgttgaagctgctaagactttggccgcaaagaacatcaaggctcgtgttgtttctttaccagatttcttcacttttgacaaacaacccttagaatacagattaagtgtcttaccagacaacgttccaatcatgtctgttgaagttttggctaccacatgttggggcaaatacgctcatcaatccttcggtattgacagatttggtgcctccggtaaggcaccagaagtcttcaagttcttcggtttcaccccagaaggtgttgctgaaagagctcaaaagaccattgcattctataagggtgacaagttgatttctcctttgaaaaaagctttctga

SEQ ID NO: 11573 - DNA, 1083 bp, Saccharomyces cerevisiae
atgtcgagctcctccaaggcttctgcaagttcatccttgtcaagcacagccacctcttcaacttctgcaactagaggcagcgacggatgtgttgtttgcgattcaactgcatcatgccctgtttgcgcttcaggagaatattgtgttatgacttcattaacatgtgacaagtgcccatccacatactgtgcgaaacagtccgattcacaactgagtagtttatcttcctcctcctctagttctagttccagtaattcaaatgagaaaacctcgttgattgtggggttcaccgtgggtattgtaggtggtgcgatgcttattgccttggtggcgttgtatttcatcaacaagagatattggaagcccaaaaggcaaaaaaataaagctttgaaattggaagaggcatcgcaaagttacgggaatgaagaggaatacttcgacgatgaagacgatgatgatgaagacgatgaggatgatggcggtatgagaaaagatgaaagtcacaccctgttcaatacgtcactggtacctccaactctcaacgtgccgggaaacagaagttcagcatctaccactcgtacaagggcttctaatattttgcctattgcctacattcctggtgtgacaagcggtttgagtaccgacaaactgcaatcaaaactacgctcgagctctaagagacaaaatgcagctggtgatatcaggtcacatataaccttaggttcttccatcttggatggtctggatgacgaagatgacgagcataaccaggtactcaataaggacgcagacgataacctcataactgctattcgtgctaaacctaaactggttcaaatcgcagaggaagagagtgataaggagattcaggacttggatgtcattgaagaacagacagaggcggatgatctttcacacatggcaaaaagcgaggcaagccatggtaataacgacgaagatgacgatgaagaaggaagttttatactggacttggaaattccagaatcgatacgcgagagcacccagggcagtcgcactgagagcccgtttgaggacaagttcgaaatacacgatgaacgataa

SEQ ID NO: 11574 - DNA, 1083 bp, Artificial Sequence
  Description of Artificial Sequence: Synthetic polynucleotide
atgtctagctcctccaaggcttctgcaagttcttccttgagtagcacagccacctcttctacttctgcaactagaggcagcgacggatgtgttgtttgcgattctactgcatcttgccctgtttgcgcttctggagaatattgtgttatgacttctttaacatgtgacaagtgcccatccacatactgtgcgaaacagtccgattctcaattgagtagtttatcttcctcctcctctagttctagttccagtaatagtaatgagaaaacctctttgattgtggggttcaccgtgggtattgtaggtggtgcgatgcttattgccttggtggcgttgtatttcatcaacaagagatattggaagcccaaaaggcaaaaaaataaagctttgaaattggaagaggcatctcaaagttacgggaatgaagaggaatacttcgacgatgaagacgatgatgatgaagacgatgaggatgatggcggtatgagaaaagatgaaagtcacacccttttcaatacgtccttagtacctccaactctcaacgtgccgggaaacagaagttctgcatctaccactcgtacaagggcttctaatattttgcctattgcctacattcctggtgtgacaagcggtttgagtaccgacaaattacaaagtaaattgcgcagcagctctaagagacaaaatgcagctggtgatatcaggagccatataaccttaggttcttccatcttggatggtttggatgacgaagatgacgagcataaccaggtactcaataaggacgcagacgataacctcataactgctattcgtgctaaacctaaattggttcaaatcgcagaggaagagagtgataaggagattcaggacttggatgtcattgaagaacagacagaggcggatgatctttctcacatggcaaaaagcgaggcaagccatggtaataacgacgaagatgacgatgaagaaggaagttttatattggacttggaaattccagaaagtatacgcgagagcacccagggcagtcgcactgagagcccgtttgaggacaagttcgaaatacacgatgaaaggtga

SEQ ID NO: 11575 - DNA, 1119 bp, Saccharomyces cerevisiae
atgcaaacgatttctggagtcttaccaacagtattaagcccctcagagcttaggtctgatgatgaacgaaccttccagtttgacgaagaagctgaaataacaacgcatttgactgaaagcgaagatttacgaaggttaatcaatgagactgcacaattaggtgtcagagttgatcatattcacgataaaactgaccaagaaattgccaggctggaaaaagtgattaaagaagttactgaaagtgatacttttttccgatcttgttctggctggtttaaaaccaataagaatttttctgacagtgaaagcagttcaaatacgcagctgaagagtctttctcaattgcatggccgctatgatcgtgattggagacagaggttgaataagtggtttagaaaaaataagagtaaattagccctaccatctgataataatctggaagaggtaaacgatgataaagtatatggatatggagaggacttgatggaacggggcaagacaccatattttagtgatattgatgattttatgaatggattgaatattatatcacccttaacacctgacgattttgaaaatgacgatacattagttaaaattgatgaaacctgccaaattcactccgcttctgaacctgagaagacctccataagtcccacatttgggaaaaatatcaaaaaggagctagtaactgatgatacggaaagcattattagcgggcctcctttgcaagagaataaaaagactcttttgaaataccgatatgtcaggacttctcttgatatgctcggctctgaaaagagtagttctaaaaataacagcggtggtatgttccgtattttccataagagtgctaattttggcgacaaaaatcaagaaaacgtgccacgagtgtgggacacacttagaaataatttgggaagggaaatttatcttttgcaaggaagattcaaaaaatggactacaaagcatcaaaatcttaagaagggccaaccttgtaaagatgaagacgccgttaccgttcccttaccatcatctgatccgggaaaggaaacacagttggaaactaaactctgttttgtgcccgaaccaggtgatcagcctttggtacaagcataa

SEQ ID NO: 11576 - DNA, 1119 bp, Artificial Sequence
  Description of Artificial Sequence: Synthetic polynucleotide
atgcaaacgatttctggagtcttaccaacagtattaagcccctctgagcttaggtctgatgatgaaagaaccttccagtttgacgaagaagctgaaataacaacgcatttgactgaaagcgaagatttaagaaggttaatcaatgagactgcacaattaggtgtcagagttgatcatattcacgataaaactgaccaagaaattgccaggttagaaaaagtgattaaagaagttactgaaagtgatacttttttcagatcttgttctggctggtttaaaaccaataagaatttttctgacagtgaaagcagtagtaatacgcagttgaagagtctttctcaattgcatggccgctatgatcgtgattggagacagaggttgaataagtggtttagaaaaaataagagtaaattagccttaccatctgataataatttggaagaggtaaacgatgataaagtatatggatatggagaggacttgatggaaagaggcaagacaccatattttagtgatattgatgattttatgaatggattgaatattatatctcccttaacacctgacgattttgaaaatgacgatacattagttaaaattgatgaaacctgccaaattcactccgcttctgaacctgagaagacctccataagtcccacatttgggaaaaatatcaaaaaggagttggtaactgatgatacggaaagcattattagcgggcctcctttgcaagagaataaaaagactcttttgaaatacagatatgtcaggacttctcttgatatgctcggctctgaaaagagtagttctaaaaataacagcggtggtatgttccgtattttccataagagtgctaattttggcgacaaaaatcaagaaaacgtgccaagagtgtgggacacacttagaaataatttgggaagggaaatttatcttttgcaaggaagattcaaaaaatggactacaaagcatcaaaatcttaagaagggccaaccttgtaaagatgaagacgccgttaccgttcccttaccatcttctgatccgggaaaggaaacacagttggaaactaaactctgttttgtgcccgaaccaggtgatcagcctttggtacaagcatga

SEQ ID NO: 11577 - DNA, 1146 bp, Saccharomyces cerevisiae
atgttgaaacgatcatctctaatatatctatcatgtgtcctaatcattaccataccaatacttttgcatgtatacaatggtccaggactgtcccatgaagccaatgaacatagggcttctcacaagcaaaaaagaacgttagcaaatccggataaacccaaaagcgaaaacgatgaagatctattttgtgcggtaaccaacccagtcaccggatcatacatagatctatcacagctatcttcaactcccaacaaattaagggagggccaaaaacagatttctggcaataacaagcatgaatcctccaagacgaagtggtcagtgagaggttggggctacgatacaaacttcacgttaggcatctgctctagtcctgtcggagaagctgagtcgcaacaactgtccaatctaacgggcgctttttacgtagaccagttgaacgaaaataatttagtatcgattggagacttcagtacaaggcctgcgttagtcggcggctctactgccaagaaattaactctcaaatacgaaaacggctctatgtgcccgaacgggaaggacaagaaggcaactttattgaattttgtctgcgataaagaaattcaatcaaaggcccagatatcatacattggaaacctacacaattgctcgtatttcttcgaagtccgcagcattcatgcgtgccccacctcaaacaaaaagaatgaagttaacgttttgggtatcttcatcggtatcttcgctatattctttttagtcgaatttgcggggagaagatggatctatgctaaactaaataggcatttgaaaaacgacgacgagttacacgacatatcgccatctttaaatgagcaaccacactgggacctcatagaggacgggtctcgctggagtaaatttttcaacgggataattaagacgacaagaaggttcacgaaatctttaatgaggtctttagtcagaggcaggaacagccgtcaagggggcataagactacggtcatccccatctgcctcttcgtccagccttgccaacagggagttcttcagagacatggaggctcaaaacgaaattattgacagcctagacatcaatagtcatacaacagaaagcgaccacccaactttggctgataatagcgtataa

SEQ ID NO: 11578 - DNA, 1146 bp, Artificial Sequence
  Description of Artificial Sequence: Synthetic polynucleotide
atgttgaaaagatcttctttgatatatttaagttgtgtcttgatcattaccataccaatacttttgcatgtatacaatggtccaggattatcccatgaagccaatgaacatagggcttctcacaagcaaaaaagaacgttagcaaatccggataaacccaaaagcgaaaacgatgaagatttattttgtgcggtaaccaacccagtcaccggatcttacatagatttatctcagctttcttctactcccaacaaattaagggagggccaaaaacagatttctggcaataacaagcatgaatcctccaagacgaagtggtctgtgagaggttggggctacgatacaaacttcacgttaggcatctgctctagtcctgtcggagaagctgagtctcaacaattatccaatttaacgggcgctttttacgtagaccagttgaacgaaaataatttagtatctattggagacttcagtacaaggcctgcgttagtcggcggctctactgccaagaaattaactctcaaatacgaaaacggctctatgtgcccgaacgggaaggacaagaaggcaactttattgaattttgtctgcgataaagaaattcaatccaaggcccagatatcttacattggaaacttgcacaattgctcttatttcttcgaagtccgcagcattcatgcgtgccccaccagtaacaaaaagaatgaagttaacgttttgggtatcttcatcggtatcttcgctatattctttttagtcgaatttgcggggagaagatggatctatgctaaattgaataggcatttgaaaaacgacgacgagttacacgacatatctccatctttaaatgagcaaccacactgggacctcatagaggacgggtctcgctggagtaaatttttcaacgggataattaagacgacaagaaggttcacgaaatctttaatgaggtctttagtcagaggcaggaacagccgtcaagggggcataagattaagaagttccccatctgcctcttcttccagccttgccaacagggagttcttcagagacatggaggctcaaaacgaaattattgacagcttggacatcaatagtcatacaacagaaagcgaccacccaactttggctgataatagcgtatga

SEQ ID NO: 11579 - DNA, 1377 bp, Saccharomyces cerevisiae
atgggtaaagagaagtctcacattaacgttgtcgttatcggtcatgtcgattctggtaagtctaccactaccggtcatttgatttacaagtgtggtggtattgacaagagaaccatcgaaaagttcgaaaaggaagccgctgaattaggtaagggttctttcaagtacgcttgggttttggacaagttaaaggctgaaagagaaagaggtatcactatcgatattgctttgtggaagttcgaaactccaaagtaccaagttaccgttattgatgctccaggtcacagagatttcatcaagaacatgattactggtacttctcaagctgactgtgctatcttgattattgctggtggtgtcggtgaattcgaagccggtatctctaaggatggtcaaaccagagaacacgctttgttggctttcaccttgggtgttagacaattgattgttgctgtcaacaagatggactccgtcaaatgggacgaatccagattccaagaaattgtcaaggaaacctccaactttatcaagaaggttggttacaacccaaagactgttccattcgtcccaatctctggttggaacggtgacaacatgattgaagctaccaccaacgctccatggtacaagggttgggaaaaggaaaccaaggccggtgtcgtcaagggtaagactttgttggaagccattgacgccattgaacaaccatctagaccaactgacaagccattgagattgccattgcaagatgtttacaagattggtggtattggtactgtgccagtcggtagagttgaaaccggtgtcatcaagccaggtatggttgttacttttgccccagctggtgttaccactgaagtcaagtccgttgaaatgcatcacgaacaattggaacaaggtgttccaggtgacaacgttggtttcaacgtcaagaacgtttccgttaaggaaatcagaagaggtaacgtctgtggtgacgctaagaacgatccaccaaagggttgcgcttctttcaacgctaccgtcattgttttgaaccatccaggtcaaatctctgctggttactctccagttttggattgtcacactgctcacattgcttgtagattcgacgaattgttggaaaagaacgacagaagatctggtaagaagttggaagaccatccaaagttcttgaagtccggtgacgctgctttggtcaagttcgttccatctaagccaatgtgtgttgaagctttcagtgaatacccaccattaggtagattcgctgtcagagacatgagacaaactgtcgctgtcggtgttatcaagtctgttgacaagactgaaaaggccgctaaggttaccaaggctgctcaaaaggctgctaagaaataa

SEQ ID NO: 11580 - DNA, 1377 bp, Artificial Sequence
  Description of Artificial Sequence: Synthetic polynucleotide
atgggtaaagagaagtctcacattaacgttgtcgttatcggtcatgtcgattctggtaagtctaccactaccggtcatttgatttacaagtgtggtggtattgacaagagaaccatcgaaaagttcgaaaaggaagccgctgaattaggtaagggttctttcaagtacgcttgggttttggacaagttaaaggctgaaagagaaagaggtatcactatcgatattgctttgtggaagttcgaaactccaaagtaccaagttaccgttattgatgctccaggtcacagagatttcatcaagaacatgattactggtacttctcaagctgactgtgctatcttgattattgctggtggtgtcggtgaattcgaagccggtatctctaaggatggtcaaaccagagaacacgctttgttggctttcaccttgggtgttagacaattgattgttgctgtcaacaagatggactccgtcaaatgggacgaatccagattccaagaaattgtcaaggaaacctccaactttatcaagaaggttggttacaacccaaagactgttccattcgtcccaatctctggttggaacggtgacaacatgattgaagctaccaccaacgctccatggtacaagggttgggaaaaggaaaccaaggccggtgtcgtcaagggtaagactttgttggaagccattgacgccattgaacaaccatctagaccaactgacaagccattgagattgccattgcaagatgtttacaagattggtggtattggtactgtgccagtcggtagagttgaaaccggtgtcatcaagccaggtatggttgttacttttgccccagctggtgttaccactgaagtcaagtccgttgaaatgcatcacgaacaattggaacaaggtgttccaggtgacaacgttggtttcaacgtcaagaacgtttccgttaaggaaatcagaagaggtaacgtctgtggtgacgctaagaacgatccaccaaagggttgcgcttctttcaacgctaccgtcattgttttgaaccatccaggtcaaatctctgctggttactctccagttttggattgtcacactgctcacattgcttgtagattcgacgaattgttggaaaagaacgacagaagatctggtaagaagttggaagaccatccaaagttcttgaagtccggtgacgctgctttggtcaagttcgttccatctaagccaatgtgtgttgaagctttcagtgaatacccaccattaggtagattcgctgtcagagacatgagacaaactgtcgctgtcggtgttatcaagtctgttgacaagactgaaaaggccgctaaggttaccaaggctgctcaaaaggctgctaagaaatga

SEQ ID NO: 11581 - DNA, 1857 bp, Saccharomyces cerevisiae
atgccgttaatgtccaattcggaaagagataaattggaaagtacattgaggagaaggtttttctacacaccctcgtttgagatatatggtggtgtgtcaggtttatttgatttagggcctccgggttgtcagttgcaaaataacttgattcgactgtggcgagaacattttattatggaagaaaacatgcttcaggttgatgggccaatgctaactccttacgatgtgttgaagacttctgggcatgtagacaaatttactgattggatgtgccgaaatcctaagactggggaatactacagagcagaccatttgattgaacagacgttgaaaaaacggctgttggacaaggatgtcaatccacaggatatgaaaaatatggagaaaatattgaccacgattgacgggttttcgggtcctgagttgaatctcgtcatgcaggaatataacattaatgatccagtcactaacgatgttttagacgcactaacttcctttaatttgatgttcgaaactaaaattggagcctcaggacaattgaaggcctttctaaggccagagactgcacaaggacaatttctcaatttcaacaaattattggaaatcaaccaagggaaaattccgtttgcttcagcttccattggtaagtcattcagaaacgaaatttcccccagaagtgggcttttaagggtaagagagtttttaatggcagaaattgagcactttgttgatccgttgaataagtcacatgcaaaattcaatgaagtgttaaatgaggagattccactactatcacgcagattacaggaaagtggtgaagtccaactgcctgtgaaaatgactataggagaggcagtgaattctggaatggtagaaaatgaaacattgggatattttatggcaagagttcatcaatttttgttgaatattgggatcaacaaggacaaattcagatttcgccagcatttgaagaatgaaatggcacactatgccacagattgttgggacggtgaaattttaacatcgtatggttggattgaatgtgtcggttgtgctgacagggcggcttttgatttaactgtacactccaagaaaacgggaagaagtctgacggtaaagcaaaagctagatacaccaaaagaaagaaccgagtgggttgtggaagtgaataagaaatttttcggatcgaagttcaaacagaaagcaaaattaatcgaatctgttttgtcaaaattttcccaggatgaattgattaggaggcatgaagaactggaaaagaacggtgaatttacctgtcaagtaaatggccagatcgtaaaactagatagcagtttggttactatcaaaatgaagacaactttgcaacatatacgagagtacattcctaatgtcattgagccctcgttcggtttaggtcgtatcatatactgcatcttcgaccattgtttccaagttcgagtggatagtgagtcaagaggcttcttctcttttccattacagatagcgccgatcaaagtatttgttacgacaatatcgaataacgatggcttccccgctatacttaagaggatctcgcaggctttacgtaaaagagagatatactttaaaattgacgattccaatacttcaattggtaaaaaatacgcccgtaacgatgaattgggaacaccatttggtatcaccatagatttcgaaactataaaagaccaaacggtgacgttaagagaaagaaattctatgaggcaagtaagaggcactattactgatgtgatttcgaccattgacaaaatgcttcacaaccctgatgaatcggactgggataaatcaacatttggactgtcgcctgttaagatataa

SEQ ID NO: 11582 - DNA, 1857 bp, Artificial Sequence
  Description of Artificial Sequence: Synthetic polynucleotide
atgccgttaatgtccaattctgaaagagataaattggaaagtacattgaggagaaggtttttctacacacccagttttgagatatatggtggtgtgagtggtttatttgatttagggcctccgggttgtcagttgcaaaataacttgattagattatggagagaacattttattatggaagaaaacatgcttcaggttgatgggccaatgttgactccttacgatgtgttgaagacttctgggcatgtagacaaatttactgattggatgtgcagaaatcctaagactggggaatactacagagcagaccatttgattgaacagacgttgaaaaaaagattattggacaaggatgtcaatccacaggatatgaaaaatatggagaaaatattgaccacgattgacgggttttctggtcctgagttgaatctcgtcatgcaggaatataacattaatgatccagtcactaacgatgttttagacgcattgacttcctttaatttgatgttcgaaactaaaattggagccagtggacaattgaaggcctttttaaggccagagactgcacaaggacaatttctcaatttcaacaaattattggaaatcaaccaagggaaaattccgtttgcttctgcttccattggtaagagtttcagaaacgaaatttcccccagaagtgggcttttaagggtaagagagtttttaatggcagaaattgagcactttgttgatccgttgaataagagtcatgcaaaattcaatgaagtgttaaatgaggagattccattgttatctcgcagattacaggaaagtggtgaagtccaattacctgtgaaaatgactataggagaggcagtgaattctggaatggtagaaaatgaaacattgggatattttatggcaagagttcatcaatttttgttgaatattgggatcaacaaggacaaattcagatttcgccagcatttgaagaatgaaatggcacactatgccacagattgttgggacggtgaaattttaacatcttatggttggattgaatgtgtcggttgtgctgacagggcggcttttgatttaactgtacactccaagaaaacgggaagaagtttaacggtaaagcaaaagttggatacaccaaaagaaagaaccgagtgggttgtggaagtgaataagaaatttttcggatccaagttcaaacagaaagcaaaattaatcgaatctgttttgagtaaattttcccaggatgaattgattaggaggcatgaagaattggaaaagaacggtgaatttacctgtcaagtaaatggccagatcgtaaaattggatagcagtttggttactatcaaaatgaagacaactttgcaacatataagagagtacattcctaatgtcattgagccctctttcggtttaggtcgtatcatatactgcatcttcgaccattgtttccaagttagagtggatagtgagagcagaggcttcttctcttttccattacagatagcgccgatcaaagtatttgttacgacaatatccaataacgatggcttccccgctatacttaagaggatctctcaggctttacgtaaaagagagatatactttaaaattgacgattccaatacttctattggtaaaaaatacgcccgtaacgatgaattgggaacaccatttggtatcaccatagatttcgaaactataaaagaccaaacggtgacgttaagagaaagaaattctatgaggcaagtaagaggcactattactgatgtgatttctaccattgacaaaatgcttcacaaccctgatgaaagtgactgggataaatctacatttggattatctcctgttaagatatga

SEQ ID NO: 11583 - DNA, 432 bp, Saccharomyces cerevisiae
atggctagtgttttgttgcctcaattgcgtacgggatggcatgtggatcaggctattgttaccgagactaaacgacttgttgtcattcgttttggtcgcaaaaatgatagacaatgtatgatcatggacgagttgttatcttcgattgctgaaagagtaaggaactttgcagttatttatttatgtgatatagatgaagtttcagattttgatgagatgtacgagctgacggatcccatgacagtaatgtttttctaccacaataagcacatgatgtgtgattttggtacagggaacaacaacaagttgaactttattgtagacgacaaacaagaaatgattgacatattagaaactatattcagaggtgccaggaagaacaaagggctggtggtctctccatacgattataatcataagcgtgtttcataa

SEQ ID NO: 11584 - DNA, 432 bp, Artificial Sequence
  Description of Artificial Sequence: Synthetic polynucleotide
atggctagtgttttgttgcctcaattgcgtacgggatggcatgtggatcaggctattgttaccgagactaaaagacttgttgtcattcgttttggtcgcaaaaatgatagacaatgtatgatcatggacgagttgttatcttccattgctgaaagagtaaggaactttgcagttatttatttatgtgatatagatgaagtttctgattttgatgagatgtacgagcttacggatcccatgacagtaatgtttttctaccacaataagcacatgatgtgtgattttggtacagggaacaacaacaagttgaactttattgtagacgacaaacaagaaatgattgacatattagaaactatattcagaggtgccaggaagaacaaagggttagtggtctctccatacgattataatcataagcgtgtttcttga

SEQ ID NO: 11585 - DNA, 1740 bp, Saccharomyces cerevisiae
atggatgaaaacggtacagtaaagcctggctatgaattaaagggactcaattcgggaaattcgaggtcaaatatggataaggatcccatcgttagcaaatttcatagggctggtctcaatgattctgcagacgaggaagatactgatatcaatggtaatcgcaacactagctggataacttcaatgattagtgaagaaaaacgcaaggtggagggaaaatctatgctgaatgatgaggaagatttgcatttatccaaagctactttgaacaaatgcgatgctctagttaagatattagcggatattatcaagctagagtttgttattcaccaatcatggtatatcagatcccttcacaagagtgtcttaattcaatttgaagtagaaacgtctggtggaaataagaatagcgccggtgatagcggcgacgatgatgatgataatcataatggtaatctggacgatagcttttataaagatttaagcttaaaatgcatcaaaaaatgcgagaagtcttcccttgcacttgagtcgctgtcaagggacattgaccaaattagagatttcataatgtccaatacaatagaagacaacagggttgacaggcttttgcagaattcgatgaccctgttattagagtgttggatctactctatgaagagattgcgccgtctaaggatgaagattgcaggtatctttgttaggtccaaacttttgcttattgatcatgaattagtgaccatatggcattttttacaggagcaaaacgagcacgaaacggttaataatgagaacgaactgaaattggcagaaacaataaaatcatacagagcgttcattaagatatttattcaacaattggaggactccgaatcgggatctccatcctcctctttgtttgaagaatgtttacacgtttttttggatatagaatcgatgtacaactctttaaacctgaattggcttttgaacgaaaacaaagcattacaagaaagactactatcaccatcgtcgacatcggagaacgatcatactaataaccttcccgttattgatgagacaaaggaaatcgaagatatcagctcatttgtcaatagcattgtggatgcatccatgttgacacatgatttgactcctattaactcatcagatagcgacaatttatcaaacggagaaatcgatcgtctagatggaagaaggttatcctcttccacgtcagatatgtcattgatgatgcaaaggacttctctgcagaaacaacttcctagcttattaactgccttcaacaacgcaagaagactagaacaagaattgcaaaacgcatgcaaagtaaacgataacaaacatagcacgaaagatactgattcaaatatacgacggaatgaacatgctatgtcttcaagtgtatcctccatcatctcccaaaactccacattagcatcaccgtctcctccgatgtcatcgtcctttatatccacggcgccatcacaatcaagttctcgtatgagtacattaccactgtctccttcctcttcattattggaatcacaatcgcaaacgctgaagaacaatatgtcgcaatggttgaaccaatcgcgatctggcctcaacggcacaaaacttattccaacaaaccacattgggtttcacagcaatgttctgaatactttgtatggtatcggtggtggtccggtatcgaaatcttataaatccaatcaaccttcttcacaaaatacttga

SEQ ID NO: 11586 - DNA, 1740 bp, Artificial Sequence
  Description of Artificial Sequence: Synthetic polynucleotide
atggatgaaaacggtacagtaaagcctggctatgaattaaagggactcaattctggaaattctaggtctaatatggataaggatcccatcgttagcaaatttcatagggctggtctcaatgattctgcagacgaggaagatactgatatcaatggtaatcgcaacactagctggataacttctatgattagtgaagaaaaacgcaaggtggagggaaaatctatgttgaatgatgaggaagatttgcatttatccaaagctactttgaacaaatgcgatgctttggttaagatattagcggatattatcaagttggagtttgttattcaccaaagttggtatatcagatcccttcacaagagtgtcttaattcaatttgaagtagaaacgtctggtggaaataagaatagcgccggtgatagcggcgacgatgatgatgataatcataatggtaatttggacgatagcttttataaagatttaagcttaaaatgcatcaaaaaatgcgagaagtcttcccttgcacttgagtctttatctagggacattgaccaaattagagatttcataatgtccaatacaatagaagacaacagggttgacaggcttttgcagaattctatgaccttattattagagtgttggatctactctatgaagagattgcgccgtttaaggatgaagattgcaggtatctttgttaggtccaaacttttgcttattgatcatgaattagtgaccatatggcattttttacaggagcaaaacgagcacgaaacggttaataatgagaacgaattgaaattggcagaaacaataaaatcttacagagcgttcattaagatatttattcaacaattggaggactccgaatctggatctccatcctcctctttgtttgaagaatgtttacacgtttttttggatatagaaagtatgtacaactctttaaacttgaattggcttttgaacgaaaacaaagcattacaagaaagattattatctccatcttctacaagtgagaacgatcatactaataaccttcccgttattgatgagacaaaggaaatcgaagatatcagctcctttgtcaatagcattgtggatgcatccatgttgacacatgatttgactcctattaactcttctgatagcgacaatttatctaacggagaaatcgatcgtttggatggaagaaggttatcctcttccacgtctgatatgtctttgatgatgcaaaggacttctttgcagaaacaacttcctagcttattaactgccttcaacaacgcaagaagattagaacaagaattgcaaaacgcatgcaaagtaaacgataacaaacatagcacgaaagatactgattctaatataagaagaaatgaacatgctatgtcttccagtgtatcctccatcatctcccaaaactccacattagcaagtccgtctcctccgatgtcttcttcctttatatccacggcgccatctcaaagtagttctcgtatgagtacattaccattatctccttcctcttctttattggaatctcaatctcaaacgttgaagaacaatatgtctcaatggttgaaccaatctcgttctggcctcaacggcacaaaacttattccaacaaaccacattgggtttcacagcaatgttttgaatactttgtatggtatcggtggtggtccggtatccaaatcttataaatccaatcaaccttcttctcaaaatacttga

SEQ ID NO: 11587 - DNA, 1371 bp, Saccharomyces cerevisiae
atgtcagagaaggcttctgaagagagacccatacggctggccgttctggggggcacttctaccggaaagacctccctggtatctaggcttactgttaatatcgtccacgaggttcattatccaacaagaaaccaaactaactggcttttcggctttgttccgtcatcgatcctggccagagctatattagacgaacaagctcacgaaagactttgccttcgttccccaagcagccaaaccttagagcctatcttcccttcacctcaggtctccaaaaatgtactgctgtcgccattggtgtttcaagcttccactgataattttcaatcagtgaggttacacaacaaaagccactccaggagatccctatctttggataaatctgattctccgctgtatcaaactttttccaatgacattaactctcaaagtgttcctaaaatcaaggcagaccagcttaacgttatcgagcattttaaattgcccctgaattacattccacccacttatgcaccaatccagattgatattattgatacgcctggcttcagtcctgataatgtggtgccgttcttagaagtttctctcttccgaaatttaggaaaatcaatcctacatggactagcagatgaaccaagacgacctgtatctactacttcactattggttgcctctggtgcctctgagttgaatggtaaagttgacggttatatcttggtgtatagcgcagtccctgaattaaaccatattggaggccctccggaatatggagatgatgtgatgaacacagatacggaaaacgtcagcgatggtggatttgaacttttaaaagtgattagaaactgcatactagatgcttggactgaatttcgaaattatgaaaaaagatgggaggaaggcaaagaggatgatatttactcattggtttacagcctgagacatctatggagtaaaaatagcaaagagaaaagcgccaaaatagagcaattgagatcctataataccaaactaaaatccatcgagttagacccctcatctcccgattcaccaccaccatgcattatcgtctgttctcacgttaatcatgaactcgcaagcccaatgttgattgaaatgggaagacaactagcaacaaaatggaaatatggatttgttggaatagacagcatggatgatttaaatgtcgatgtggcggttagcttactaataaaggaaatatcagaaaagatgaagctactggtttctaattccaatggaagtagtagtagtggtaattcaagttcaatttacaactctcatttaatgaatgacaagaagaaaaacaacaatgccggcttaaacaaaaatatgttgaagaaaattataaaataa

SEQ ID NO: 11588 - DNA, 1371 bp, Artificial Sequence
  Description of Artificial Sequence: Synthetic polynucleotide
atgtctgagaaggcttctgaagagagacccataaggttggccgttttggggggcacttctaccggaaagacctccttagtatctaggcttactgttaatatcgtccacgaggttcattatccaacaagaaaccaaactaactggcttttcggctttgttccgtcttctatcttggccagagctatattagacgaacaagctcacgaaagactttgccttcgttccccaagcagccaaaccttagagcctatcttcccttctcctcaggtctccaaaaatgtattgctttctccattggtgtttcaagcttccactgataattttcaatctgtgaggttacacaacaaaagccactccaggagatccttatctttggataaatctgattctccgttatatcaaactttttccaatgacattaactctcaaagtgttcctaaaatcaaggcagaccagcttaacgttatcgagcattttaaattgcccttgaattacattccacccacttatgcaccaatccagattgatattattgatacgcctggcttcagtcctgataatgtggtgccgttcttagaagtttctctcttcagaaatttaggaaaatctatcttgcatggattagcagatgaaccaagaagacctgtatctactacttctttgttggttgcctctggtgcctctgagttgaatggtaaagttgacggttatatcttggtgtatagcgcagtccctgaattaaaccatattggaggccctccggaatatggagatgatgtgatgaacacagatacggaaaacgtcagcgatggtggatttgaacttttaaaagtgattagaaactgcatattggatgcttggactgaatttagaaattatgaaaaaagatgggaggaaggcaaagaggatgatatttactctttggtttacagcttaagacatctttggagtaaaaatagcaaagagaaaagcgccaaaatagagcaattgagatcctataataccaaattgaaatccatcgagttagacccctcttctcccgattctccaccaccatgcattatcgtctgttctcacgttaatcatgaactcgcaagcccaatgttgattgaaatgggaagacaattggcaacaaaatggaaatatggatttgttggaatagacagcatggatgatttaaatgtcgatgtggcggttagcttattgataaaggaaatatctgaaaagatgaagttattggtttctaattccaatggaagtagtagtagtggtaatagtagttctatttacaactctcatttaatgaatgacaagaagaaaaacaacaatgccggcttaaacaaaaatatgttgaagaaaattataaaatga

SEQ ID NO: 11589 - DNA, 1332 bp, Saccharomyces cerevisiae
atgagaggctttagtaatgagataatcctgaagagaacgttgactttatccgatttcaccttacgttaccataaaaggggcatcacagctttgcaggtcatcaaagcaccgtcagtttcgaatgtgccagtcttgttatccggtgataactacggttatttcgttatgtgggacctggtgaccaagagaccgattacacatatagaaatcgagggcaactcgcacattatagcgttttggtgggtggaaactaccaatgtgctgtacattctttcgaaagactccatgctgcgaatttttgagcttgattcatctacacaactatctatagatttagttagaaagcttagccaagccaataaaacggatcatttacaatggactaaaatctatgaaatgcccataaacacactgaattttgcgaatttcatcatcgaagctgaagtgaaaccaaccaaagataataaaagttatagattggtttgctgtcatactgatgattcggaaactatcgatatatatcagataatagaagactccacatttaaattgaaaagaccattcaataatattaatttccccagattcttgaagcagcagaattttttaggaatttcgaaagactccaaattcggtatcataatgagatttgctaaattaaacgatgtcatatttttaggttatgaaaatgggtttgtagtcggatttaaaattacttttgatgaaggccttcaaagggacattgcagaactggtccatgtttctaacgatcattatccgaatccaatacttgatatgtgtgttagcggggatgaactttatagttgttcaacagacgatttcataaccaagtacaaaattccagtgaacttacaacttgagacgaaataccttagagatgatgcgcttttgataaaatgcccaagctcactgagagtcagtgagccatcaaaagtacatcttcccttgaagaatattggtcatattgataaagtaaaagacgattacttagtcgtgagtagttggtcaggtatgaccattgtttataatatgcggacttcagaagtggagcaaacttttgtgaaatcaaagaacaacctggtcgtgagtgatagctctatgggagacctaacaaacggtagcggctcaaataccgaatccagctcgaaatcccataactataaagtgggagccatgacatgtttggaatcgtttgatgtgcagtcagatgggttgaggttaggacaacttagacgtattaaagcgctggcgaaatgtaactggtgtttaattggatatgaagatggtaccataaagctcaataaaatataa

SEQ ID NO: 11590 - DNA, 1332 bp, Artificial Sequence
  Description of Artificial Sequence: Synthetic polynucleotide
atgagaggctttagtaatgagataatcttgaagagaacgttgactttatccgatttcaccttacgttaccataaaaggggcatcacagctttgcaggtcatcaaagcaccgtctgtttctaatgtgccagtcttgttatccggtgataactacggttatttcgttatgtgggacttggtgaccaagagaccgattacacatatagaaatcgagggcaactctcacattatagcgttttggtgggtggaaactaccaatgtgttatacattctttctaaagactccatgttaagaatttttgagcttgattcttctacacaattatctatagatttagttagaaagcttagccaagccaataaaacggatcatttacaatggactaaaatctatgaaatgcccataaacacattaaattttgcgaatttcatcatcgaagctgaagtgaaaccaaccaaagataataaaagttatagattggtttgctgtcatactgatgattctgaaactatcgatatatatcagataatagaagactccacatttaaattgaaaagaccattcaataatattaatttccccagattcttgaagcagcagaattttttaggaatttccaaagactccaaattcggtatcataatgagatttgctaaattaaacgatgtcatatttttaggttatgaaaatgggtttgtagtcggatttaaaattacttttgatgaaggccttcaaagggacattgcagaattggtccatgtttctaacgatcattatccgaatccaatacttgatatgtgtgttagcggggatgaactttatagttgttctacagacgatttcataaccaagtacaaaattccagtgaacttacaacttgagacgaaataccttagagatgatgcgcttttgataaaatgcccaagcagtttgagagtcagtgagccatctaaagtacatcttcccttgaagaatattggtcatattgataaagtaaaagacgattacttagtcgtgagtagttggtctggtatgaccattgtttataatatgcgtacttctgaagtggagcaaacttttgtgaaatccaagaacaacttggtcgtgagtgatagctctatgggagacttgacaaacggtagcggcagtaataccgaatccagcagtaaatcccataactataaagtgggagccatgacatgtttggaaagttttgatgtgcagagcgatgggttgaggttaggacaacttagacgtattaaagcgttagcgaaatgtaactggtgtttaattggatatgaagatggtaccataaagctcaataaaatatga

SEQ ID NO: 11591 - DNA, 1038 bp, Saccharomyces cerevisiae
atgatgactagggagagcatagataaaagagcaggaagaaggggtcctaatctgaatattgtgctgacgtgtccggagtgcaaagtctacccaccaaaaatcgttgaaagatttagtgaaggggatgttgtatgtgctctatgtggtctagtactatcagataaactggttgacaccaggtcggagtggagaacgttttcaaatgatgatcacaacggtgatgacccaagtcgtgttggtgaggcttcaaatcctcttttagatgggaataacctatctacaaggatcggaaagggtgaaaccacggatatgagattcaccaaagaactgaataaggcacaaggaaaaaatgtgatggataaaaaggataatgaagtacaagctgcatttgctaagattaccatgctatgtgatgctgctgaattaccgaagattgtgaaagattgtgccaaggaagcatataaactttgccacgatgaaaaaactttgaaggggaaatcaatggagagtataatggctgcatccatactgattggttgcagacgtgctgaagtggcaaggacttttaaagaaatccagtcattaatccatgtcaaaactaaagagtttggtaaaactttaaacataatgaagaacattttaagaggcaagagcgaagatggtttcttgaagattgataccgataatatgagtggtgcacaaaacctaacttatatacccaggttttgttcgcatctgggcttaccgatgcaagtcactacttctgctgaatataccgcaaagaaatgtaaagagatcaaagaaattgcaggtaaatcccctattactatcgctgttgtttccatctatctaaacatcctgctctttcagatccctattaccgcagcgaaagtgggccaaaccttgcaagttactgaaggtaccatcaaatctggttacaagatactttatgagcatagagacaagcttgtggatccgcagcttattgctaatggtgtagtgtctttggataacttaccgggcgttgaaaagaaataa

SEQ ID NO: 11592 - DNA, 1038 bp, Artificial Sequence
  Description of Artificial Sequence: Synthetic polynucleotide
atgatgactagggagagcatagataaaagagcaggaagaaggggtcctaatttgaatattgtgttaacgtgtccggagtgcaaagtctacccaccaaaaatcgttgaaagatttagtgaaggggatgttgtatgtgctctttgtggtttagtattaagtgataaattggttgacaccaggagtgagtggagaacgttttctaatgatgatcacaacggtgatgacccaagtcgtgttggtgaggcttctaatcctcttttagatgggaataacttatctacaaggatcggaaagggtgaaaccacggatatgagattcaccaaagaattgaataaggcacaaggaaaaaatgtgatggataaaaaggataatgaagtacaagctgcatttgctaagattaccatgctttgtgatgctgctgaattaccgaagattgtgaaagattgtgccaaggaagcatataaactttgccacgatgaaaaaactttgaaggggaaatctatggagagtataatggctgcatccatattgattggttgcagacgtgctgaagtggcaaggacttttaaagaaatccagtctttaatccatgtcaaaactaaagagtttggtaaaactttaaacataatgaagaacattttaagaggcaagagcgaagatggtttcttgaagattgataccgataatatgagtggtgcacaaaacttgacttatatacccaggttttgttctcatttaggcttaccgatgcaagtcactacttctgctgaatataccgcaaagaaatgtaaagagatcaaagaaattgcaggtaaatcccctattactatcgctgttgtttccatctatttgaacatcttactctttcagatccctattaccgcagcgaaagtgggccaaaccttgcaagttactgaaggtaccatcaaatctggttacaagatactttatgagcatagagacaagcttgtggatccgcagcttattgctaatggtgtagtgtctttggataacttaccgggcgttgaaaagaaatga

SEQ ID NO: 11593 - DNA, 1626 bp, Saccharomyces cerevisiae
atggttttggctgatttggggaagcggattaattctgctgtgaataacgcgatttccaatacacaggatgactttactacatccgtagatgtaatgttaaagggcatcgtgactgcgttgttagaatcggatgtgaatattgccctggtttctaagttacgaaataatataaggtcacagctgctgagtgagaaccgtagtgagaagtccacaacaaacgcacaaactaagaagcttattcagaaaacggtgtttgatgaactgtgtaagttggtcacctgcgaaggtagtgaagagaaggcctttgtgcccaagaagagaaagacaaacatcatcatgtttgttgggctgcaaggttcaggtaaaactacttcctgtaccaagttagcagtttactactcgaagagaggtttcaaagtgggtttggtatgtgcggatactttccgtgctggtgcatttgaccaattgaaacaaaacgctataagagcaagaattccattttatgggtcatatacggagactgaccctgccaaagttgcagaagaaggtattaacaagtttaagaaagagaagtttgatatcatcatcgttgatacttcaggtaggcatcatcaagaagaagagttgttccaagaaatgattgaaatatccaatgtcatcaagcctaatcaaactatcatggttttagatgcttccattggtcaagctgcagagcaacaatccaaggctttcaaagaatcgtccgattttggtgccattatattaaccaagatggacggccacgctagagggggtggggcaatttcggccgttgcagccacaaacactccgattatctttattggtacaggtgagcacattcatgatttggaaaagttctcgcctaagtcattcatatctaaactgttgggtattggtgatatagagagtctctttgagcaattacaaaccgtttccaacaaggaagatgcaaaagccacaatggaaaacatccaaaagggtaagttcaccttgctagatttcaagaaacagatgcaaacaataatgaaaatgggtccattatcaaatatagcgcagatgattcctggtatgagtaatatgatgaatcaagtaggggaggaggaaacctctcaaaagatgaagaaaatggtttacgttttggattctatgactaaagaagaactagaatctgatggtagaatgttcattgaagagcctacaagaatggttcgtgtagctaaaggttcaggtacttctgtgttcgaggtagaaatgatattgatgcaacagcagatgatggcaagaatggcacaaaccgcaacccagcaacaaccaggagcccctggtgccaatgctaggatgcctggcatgccaaacatgccgggtatgccaaacatgcctggtatgccgaatatgcctggtatgccaaaagtgactccacaaatgatgcagcaggcacaacaaaagctgaagcaaaatccaggtctaatgcaaaatatgatgaacatgtttggtggcggaatgggcggaggaatgggcggaggaatgcctgatatgaacgaaatgatgaaaatgatgcaagatccacaaatgcaacaaatggcaaaacaattcggtatgggctaa

SEQ ID NO: 11594 - DNA, 1626 bp, Artificial Sequence
  Description of Artificial Sequence: Synthetic polynucleotide
atggttttggctgatttggggaagagaattaattctgctgtgaataacgcgatttccaatacacaggatgactttactacatccgtagatgtaatgttaaagggcatcgtgactgcgttgttagaaagtgatgtgaatattgccttagtttctaagttaagaaataatataaggagccagttattaagtgagaaccgtagtgagaagtccacaacaaacgcacaaactaagaagcttattcagaaaacggtgtttgatgaattatgtaagttggtcacctgcgaaggtagtgaagagaaggcctttgtgcccaagaagagaaagacaaacatcatcatgtttgttgggttgcaaggttctggtaaaactacttcctgtaccaagttagcagtttactactccaagagaggtttcaaagtgggtttggtatgtgcggatactttccgtgctggtgcatttgaccaattgaaacaaaacgctataagagcaagaattccattttatgggtcttatacggagactgaccctgccaaagttgcagaagaaggtattaacaagtttaagaaagagaagtttgatatcatcatcgttgatacttctggtaggcatcatcaagaagaagagttgttccaagaaatgattgaaatatccaatgtcatcaagcctaatcaaactatcatggttttagatgcttccattggtcaagctgcagagcaacaatccaaggctttcaaagaatcttccgattttggtgccattatattaaccaagatggacggccacgctagagggggtggggcaatttctgccgttgcagccacaaacactccgattatctttattggtacaggtgagcacattcatgatttggaaaagttcagtcctaagagtttcatatctaaacttttgggtattggtgatatagagagtctctttgagcaattacaaaccgtttccaacaaggaagatgcaaaagccacaatggaaaacatccaaaagggtaagttcaccttgttggatttcaagaaacagatgcaaacaataatgaaaatgggtccattatccaatatagcgcagatgattcctggtatgagtaatatgatgaatcaagtaggggaggaggaaacctctcaaaagatgaagaaaatggtttacgttttggattctatgactaaagaagaattggaatctgatggtagaatgttcattgaagagcctacaagaatggttcgtgtagctaaaggttctggtacttctgtgttcgaggtagaaatgatattgatgcaacagcagatgatggcaagaatggcacaaaccgcaacccagcaacaaccaggagcccctggtgccaatgctaggatgcctggcatgccaaacatgccgggtatgccaaacatgcctggtatgccgaatatgcctggtatgccaaaagtgactccacaaatgatgcagcaggcacaacaaaagttgaagcaaaatccaggtttgatgcaaaatatgatgaacatgtttggtggcggaatgggcggaggaatgggcggaggaatgcctgatatgaacgaaatgatgaaaatgatgcaagatccacaaatgcaacaaatggcaaaacaattcggtatgggctga

SEQ ID NO: 11595 - DNA, 2667 bp, Saccharomyces cerevisiae
atgaacagtgtttgggatgatgctagaatagaggacagaacggtggacaaaccagtaggctcctctcacgctcaggagaaactcgcgctggtaaaatcaactttgtttaaacttgaccaagaagatagaccagaatgcgattcctgggtacaactagtcaaattgatctgcgacgaagaccgtgaagaagaatttactacattcaaggagttattaagggaagtcaaaaacgttaatgataaatccgtcacaggcgttgccttgattcattatatcattgtatttgatcgtgcagactacattgagttactacatgataatccttctggtgcaaaattagatttgaatcttgtcgacgacattgtaggttacacacctttgatgtggagtttcagtctgcagagaaggaactgttgcttggagctgttcaacgcattcgacgagataaacttcaacatgacgaataaggctggattaaccgcttgggatatggttcctccatattcaccactttcggaatttttggaacaaaacaatatgtttcgataccgtaccgaagtaaaacatgaaatacctcaaatttcccaaccgaaagacacctctcttctaatgagtaatgaagactctaccacgaaagaaacttttgataatattgacttacaagtcgccggtttgaccctgtcccctggtgcaaatgacaacatgtttctggattctgatgaaaagaacatgaatcattctcagggagctgcaaccctaatagatcccacatatacagaagactaccacggtacatttgattatgataaactatctccggaccaatacttggaattttccgactttgatataccacaaatcctgaatctattgatatcgctaccacaaaaggaacctcacatgaccacctatccagctggtttaatataccaatgtattagatatgctgatcataagataaagtccaagccactagtagaatcgttaattaacttatctctaacaaaaattctgaccagtgtttcatccaacggagctgcaggattggtctccacagaagcttctttgcaagcaggtgacattgtattgcaatcgtattggttaagttgtttatcttttctctattactacctctgtagagatgattcatttttcaagaggcatccaagcgtgttacaagagctgattaacaccatccactctattatcatagaactgacatcttccattcattgcaggttgatttctttgatagattcaactttactagcatacacaacaatccaggacgttaaacaaactttatacaaaagagactggaacttttttaaaaagagaaagcaggccaagcttttattgaaggaaaagaacagaaaacaattaaaggaacaacaaaagaaagaacttcatcgaaaaagccagggtcaagaaaatcatgaagaagaggagggtcaacaagatgggaatgattcagatgatagggcatcaacaaatgatgataacaattctagtgtttcactcttttatgataaagaaattttgagacatttatatcctccatcattcgaagagcagatgaaaccctctccactaaagattgttcaaatatttggtgccttgtcttacgttcttaatttacatcaaacgcatccgattttccaacaacagtgtctctctatttcagttaactggtttgccacgaccttattcaataagatcttaaaggacaaaaagaaaagatctttatcaagagcccatgctattcaaatcaggttaaatctttcaactctagaatcatggatacagaacaacgatttctgtgttcctaaaccgatgcttattgatgacttcatgtggcagcgctttccaatgactttaattcgcgacgttggcgagatagatttatcggatccgatactaagaaatgtagcaacttacaaacctatagatgaaaataacaaggacttgatatatgatacgtcaaactcattattttactaccaacctttccataagatcgcccaaattcatcttgagccagttttccaactattacaatggttgcaagtagctacaacactagatagtgaagaatcattaatatcaacaatgaatttattaccaagaattacaccagtacagctcctaaagtctatggaaaaatacaattacgaattgaatgaaaataaattcaactccaaactgaagaaatttttaaacaacaaaatcaaagatagtaagatgagcaaggcagacgcgtatttacaagaacatgaaataccgtatctagttttaccaactatacccgaaatgacagacttgtattcaaagggtcctgattcacattctttccaaccgtttttaccaggcagtatccaagacgatgtttatgaaattcacgatgtcaacttcaaacaaagacaaaatgaaccacagatatctcggactaactcgggtacctcagattttactggagatgaggataaggcgcaatatgaaactgaaggggtaggggaaagtatagatattaacgaaacagtcgaacccgagagcaacgcgttcaatgtaggtaatgatgattattttaaagaattaaatattccgtcttcaactgctcaacgtcctgcttggtcgaataatgatgatatggaacaaaatccgtggtaa

SEQ ID NO: 11596 - DNA, 2667 bp, Artificial Sequence
  Description of Artificial Sequence: Synthetic polynucleotide
atgaacagtgtttgggatgatgctagaatagaggacagaacggtggacaaaccagtaggctcctctcacgctcaggagaaactcgcgttggtaaaatctactttgtttaaacttgaccaagaagatagaccagaatgcgattcctgggtacaattggtcaaattgatctgcgacgaagaccgtgaagaagaatttactacattcaaggagttattaagggaagtcaaaaacgttaatgataaatccgtcacaggcgttgccttgattcattatatcattgtatttgatcgtgcagactacattgagttattacatgataatccttctggtgcaaaattagatttgaatcttgtcgacgacattgtaggttacacacctttgatgtggagtttcagtttacagagaaggaactgttgcttggagcttttcaacgcattcgacgagataaacttcaacatgacgaataaggctggattaaccgcttgggatatggttcctccatattctccactttctgaatttttggaacaaaacaatatgtttagataccgtaccgaagtaaaacatgaaatacctcaaatttcccaaccgaaagacacctctcttttgatgagtaatgaagactctaccacgaaagaaacttttgataatattgacttacaagtcgccggtttgaccttatcccctggtgcaaatgacaacatgtttttggattctgatgaaaagaacatgaatcattctcagggagctgcaaccttaatagatcccacatatacagaagactaccacggtacatttgattatgataaattatctccggaccaatacttggaattttccgactttgatataccacaaatcttgaatttattgatatctttaccacaaaaggaacctcacatgaccacctatccagctggtttaatataccaatgtattagatatgctgatcataagataaagtccaagccattagtagaatctttaattaacttatctttaacaaaaattttgaccagtgtttcttccaacggagctgcaggattggtctccacagaagcttctttgcaagcaggtgacattgtattgcaaagttattggttaagttgtttatcttttctctattactacctctgtagagatgattcttttttcaagaggcatccaagcgtgttacaagagttgattaacaccatccactctattatcatagaattaacatcttccattcattgcaggttgatttctttgatagattctactttattggcatacacaacaatccaggacgttaaacaaactttatacaaaagagactggaacttttttaaaaagagaaagcaggccaagcttttattgaaggaaaagaacagaaaacaattaaaggaacaacaaaagaaagaacttcatagaaaaagccagggtcaagaaaatcatgaagaagaggagggtcaacaagatgggaatgattctgatgatagggcaagcacaaatgatgataacaattctagtgtttctctcttttatgataaagaaattttgagacatttatatcctccatctttcgaagagcagatgaaaccctctccattgaagattgttcaaatatttggtgccttgtcttacgttcttaatttacatcaaacgcatccgattttccaacaacagtgtctctctatttctgttaactggtttgccacgaccttattcaataagatcttaaaggacaaaaagaaaagatctttatctagagcccatgctattcaaatcaggttaaatctttctactttggaaagttggatacagaacaacgatttctgtgttcctaaaccgatgcttattgatgacttcatgtggcagcgctttccaatgactttaattcgcgacgttggcgagatagatttaagtgatccgatattaagaaatgtagcaacttacaaacctatagatgaaaataacaaggacttgatatatgatacgtccaactctttattttactaccaacctttccataagatcgcccaaattcatcttgagccagttttccaattattacaatggttgcaagtagctacaacattagatagtgaagaatctttaatatctacaatgaatttattaccaagaattacaccagtacagctcttgaagtctatggaaaaatacaattacgaattgaatgaaaataaattcaactccaaattgaagaaatttttaaacaacaaaatcaaagatagtaagatgagcaaggcagacgcgtatttacaagaacatgaaataccgtatttggttttaccaactatacccgaaatgacagacttgtattccaagggtcctgattctcattctttccaaccgtttttaccaggcagtatccaagacgatgtttatgaaattcacgatgtcaacttcaaacaaagacaaaatgaaccacagatatctagaactaacagtggtacctctgattttactggagatgaggataaggcgcaatatgaaactgaaggggtaggggaaagtatagatattaacgaaacagtcgaacccgagagcaacgcgttcaatgtaggtaatgatgattattttaaagaattaaatattccgtcttctactgctcaacgtcctgcttggtctaataatgatgatatggaacaaaatccgtggtga

SEQ ID NO: 11597 - DNA, 2313 bp, Saccharomyces cerevisiae
atggctagcttgaaggtatttctcgcagtttacttgcttggcggtatcacatttttgcctttggtccttttcaccctctataaaatccatttattgtacagtaaccttaaatcggcatcgaagaaggagctagatcatgatacagcagacgaaattgatgagaaaaccagacttctggctcgcgatatagacccagagtttaaagcacgcaagctagaagagcaattaggtgtcaaagtttttaacaagggttggatcaccgtcactaagcaatattattatcattcttcagaagtggctgtaattttgaagaattctaataataataaagattcagacactgcacttcaagagcaaatcttgcaaagaacagacttgaagaaaaaacaaaggttttttgcagtattaagacatggaaatttgtttttgtataaagacgattctcaaaatgcaaatttggtccatgctatatctttacaaaacagatttatcaccatttggccccgtttcgatgaactgggtaaggaagaattgccagatgcctcgcttttcactaagagaacttgtattgctattttcaagaatgacctcgtttctatagactctaaaaaccataatgttatcctgccacacttcgacccacttaccagtgctgaatcgaataacggtgacatctctaccaatgacactacacatgaatatcaatcacaattccatagctcaaatcagttcttcttgtatttcgataataacatggacaaagaagattggtattatcagttgatcaatgcctctaaaaacagtaattccctctcaactggtttattggatcctaatgtttcagctaacgcagctcatttgaagactaaggatatgttacaattgattcaggatatcaactctactgaaaatcagttaactactaagtggctgaatgctcttcttgggagattatttctttctctgcaacaaactgatacgttgaataagtttattcatgagaaaatctgcaagaaattgaataaaataaaaaccccagggttcttggatgatttggttgttgaaaaggtcgacgtgggtgatagtgctccattattcacctctcctgagttattagaattgtctcctgagggttcgactaagattgctatcgacgttcaatacaggggaaacttgacaattattattgcgacaaaggcgagtattaacttgggatcacgtttcaaacaaagggaggtttctttgcagttgtccataaaaattaaagaattttccggtccacttttatttttaatcaaaccacctccatctaacagaatttggtatgcttttcgcaccgaacctataatggattttgaaattgagcccattgtcagttcaagtaaattatcatacaacgtcgttactaacgctataaagagtaagtttgccgaagccgtgaaggagtccctagttgtaccgtttatggatgatattgttttttatccaacacctaatgaagtatacagaggtggtatttgggaggagcaggatcctgaggcagcggcgagggctcgcactgctgcggcagcctcagatatgaataatactagtgctaaggaacacttagaagcacttcaagagggcggaatgaaaacccagagtcgaatcaaaaaagccttaaggccagagagaaagaaagaaaacctaaaagatcttgttgacgcatctggagtggcaacgaaaactacaacccagacaacagtcacaaccgcgactaatgatgatgtttccagttctgaaaattctaccaagtcaaggaaatacttcaagaattcaatcaagaaaatcggtagatggtataaggataatgttggtaattcgagtgacaccgaagatatggatgaaatagatgttcaagataagaaaaatgacgattcagcagatgagagagaatcagataatcctatccttacatccaatccaaaaatgatttctaataggagaccagtaccaagaaggccttcacaaccgttaaatacactatctccaaaactagaaggcaggaaggaaaaagacactgagaattttccagttccaccgtcggcttcaaatatgaatgcttcaaagatgtttgcgaacaaagaaaatagaaagttttctgtatcctcaaatgattctcagaattcgctcaaaaatggtgatccccatgtgaaagcttcaaaacttgaaagctctcaagcttttgttaagaagacctctcagaatcgttttaatgacggctttttcaagcaagatttagaatttgaagaacagcgagagcccaaactgtga

SEQ ID NO: 11598 - DNA, 2313 bp, Artificial Sequence
  Description of Artificial Sequence: Synthetic polynucleotide
atggctagcttgaaggtatttctcgcagtttacttgcttggcggtatcacatttttgcctttggtccttttcaccctctataaaatccatttattgtacagtaaccttaaatctgcatccaagaaggagttagatcatgatacagcagacgaaattgatgagaaaaccagacttttagctcgcgatatagacccagagtttaaagcacgcaagttggaagagcaattaggtgtcaaagtttttaacaagggttggatcaccgtcactaagcaatattattatcattcttctgaagtggctgtaattttgaagaattctaataataataaagattctgacactgcacttcaagagcaaatcttgcaaagaacagacttgaagaaaaaacaaaggttttttgcagtattaagacatggaaatttgtttttgtataaagacgattctcaaaatgcaaatttggtccatgctatatctttacaaaacagatttatcaccatttggccccgtttcgatgaattgggtaaggaagaattgccagatgcctctcttttcactaagagaacttgtattgctattttcaagaatgacctcgtttctatagactctaaaaaccataatgttatcttgccacacttcgacccacttaccagtgctgaaagtaataacggtgacatctctaccaatgacactacacatgaatatcaatctcaattccatagcagtaatcagttcttcttgtatttcgataataacatggacaaagaagattggtattatcagttgatcaatgcctctaaaaacagtaattccctctccactggtttattggatcctaatgtttctgctaacgcagctcatttgaagactaaggatatgttacaattgattcaggatatcaactctactgaaaatcagttaactactaagtggttaaatgctcttcttgggagattatttctttctttacaacaaactgatacgttgaataagtttattcatgagaaaatctgcaagaaattgaataaaataaaaaccccagggttcttggatgatttggttgttgaaaaggtcgacgtgggtgatagtgctccattattcacctctcctgagttattagaattgtctcctgagggttctactaagattgctatcgacgttcaatacaggggaaacttgacaattattattgcgacaaaggcgagtattaacttgggatcccgtttcaaacaaagggaggtttctttgcagttgtccataaaaattaaagaattttccggtccacttttatttttaatcaaaccacctccatctaacagaatttggtatgcttttcgcaccgaacctataatggattttgaaattgagcccattgtcagtagtagtaaattatcttacaacgtcgttactaacgctataaagagtaagtttgccgaagccgtgaaggagtccttggttgtaccgtttatggatgatattgttttttatccaacacctaatgaagtatacagaggtggtatttgggaggagcaggatcctgaggcagcggcgagggctcgcactgctgcggcagcctctgatatgaataatactagtgctaaggaacacttagaagcacttcaagagggcggaatgaaaacccagagtagaatcaaaaaagccttaaggccagagagaaagaaagaaaacttgaaagatcttgttgacgcatctggagtggcaacgaaaactacaacccagacaacagtcacaaccgcgactaatgatgatgtttccagttctgaaaattctaccaagtccaggaaatacttcaagaattccatcaagaaaatcggtagatggtataaggataatgttggtaatagtagtgacaccgaagatatggatgaaatagatgttcaagataagaaaaatgacgattctgcagatgagagagaaagtgataatcctatccttacatccaatccaaaaatgatttctaataggagaccagtaccaagaaggccttctcaaccgttaaatacattatctccaaaattagaaggcaggaaggaaaaagacactgagaattttccagttccaccgagtgcttctaatatgaatgcttccaagatgtttgcgaacaaagaaaatagaaagttttctgtatcctctaatgattctcagaatagtctcaaaaatggtgatccccatgtgaaagcttccaaacttgaaagctctcaagcttttgttaagaagacctctcagaatcgttttaatgacggctttttcaagcaagatttagaatttgaagaacagagagagcccaaattatga

SEQ ID NO: 11599 - DNA, 867 bp, Saccharomyces cerevisiae
atggaagagtgtcctatttgtttggcagatgaccaagagggtgaacaatttggatgtttgaacgtttgcgggcataaattccacttaaactgtataagagagtggcacaagtatagtatcaacttgaagtgccccatctgcagggttgaatccacccatttagaagttggcgaagggcaacatgcactttctataaatttgaagatggggtttatgattaagaatgctatcgattatgtgggggccgaaacaactaacgaaagaaatgaggacgatacaggggagcaagaccaagaaatagaatttctcagcgaaaggcttagaggtacgctggtgatggataccattaagataattcagtgcagcatatgcggagacacagatgtttctcgattaagcctgtattgccaagactgcgaagcaatatatcacgaaacatgtctacgcgggctagcttgtgaggtgggcgatcgcaatacgtggcaggagtgcacagattgtagatcaaatgcattgctcgagctgcgcatgggtgctatcagtagccaacttgctagctacgattccaggaattccatgatttttgctggtgagttacgggacaagcacagcgtcaagacacagcagatgtatgaacagatacggaatgccaagcacaaaatccagatgcacgtgcgacgagcactggaccggtacccactgcctctgctgcgcttcaaggatgcctacaagcacgtcaacaagcaagtatcccgcaagttgtaccgtctctctgacaacaagtacctgcctgaccagtacgattacgactctttagcccgaactggagtgcacacagaactcctaatttactgtcatgatgagtag

SEQ ID NO: 11600 - DNA, 867 bp, Artificial Sequence
  Description of Artificial Sequence: Synthetic polynucleotide
atggaagagtgtcctatttgtttggcagatgaccaagagggtgaacaatttggatgtttgaacgtttgcgggcataaattccacttaaactgtataagagagtggcacaagtatagtatcaacttgaagtgccccatctgcagggttgaatccacccatttagaagttggcgaagggcaacatgcactttctataaatttgaagatggggtttatgattaagaatgctatcgattatgtgggggccgaaacaactaacgaaagaaatgaggacgatacaggggagcaagaccaagaaatagaatttctcagcgaaaggcttagaggtacgttagtgatggataccattaagataattcagtgcagcatatgcggagacacagatgtttctagattaagcttgtattgccaagactgcgaagcaatatatcacgaaacatgtttacgcgggttggcttgtgaggtgggcgatcgcaatacgtggcaggagtgcacagattgtagatctaatgcattgctcgagttacgcatgggtgctatcagtagccaacttgctagctacgattccaggaattccatgatttttgctggtgagttaagagacaagcacagcgtcaagacacagcagatgtatgaacagataagaaatgccaagcacaaaatccagatgcacgtgagaagagcattggacagatacccattgcctttacttcgcttcaaggatgcctacaagcacgtcaacaagcaagtatcccgcaagttgtaccgtctctctgacaacaagtacttacctgaccagtacgattacgactctttagccagaactggagtgcacacagaactcttgatttactgtcatgatgagtga

SEQ ID NO: 11601 - DNA, 324 bp, Saccharomyces cerevisiae
atgtcccgccatcagtttgatctaataatgtgcctaaagcagcctggtgtacagacaggtcttctttgtgaaaaatgtgatggcaaatgtcctatctgcgactcttatgtaaggcccaaaaggaaagttagagtatgtgaaaactgttcgtttggtaaacaagctaaaaattgtataatttgtaatctaaatgttggagtcaatgacgcattctattgttgggagtgctgccgcttaggtaaagataaagatggctgtcctaggatcttaaaccttggcagcaatagactggatagacatttcgagaaaaagaaaaaggtataa

SEQ ID NO: 11602 - DNA, 324 bp, Artificial Sequence
  Description of Artificial Sequence: Synthetic polynucleotide
atgtcccgccatcagtttgatttgataatgtgcttgaagcagcctggtgtacagacaggtcttctttgtgaaaaatgtgatggcaaatgtcctatctgcgactcttatgtaaggcccaaaaggaaagttagagtatgtgaaaactgttcctttggtaaacaagctaaaaattgtataatttgtaatttgaatgttggagtcaatgacgcattctattgttgggagtgctgccgcttaggtaaagataaagatggctgtcctaggatcttaaaccttggcagcaatagattagatagacatttcgagaaaaagaaaaaggtatga

SEQ ID NO: 11603 - DNA, 3681 bp, Saccharomyces cerevisiae
atgaatcagtctatttcttcgttgattaagcttaaattccttcaatcacacagtaacgataaaaatggcaacaaaaagggcggaagcaatgtttcaacaggcatagataaattaagagagtcggaaagttatagaagtccttttcttcaactcgcagaaatacaggaacacactaataatgacgacgataaacttgatgtaaaagaatgcgagcccacaaaaaaacacagcaaactaagcaggatacggcgtaagatgggtaggttagacttgaatttcaggtcagccaatgaaaagggttctgaagatgatgaaatcttggttgcacaacacctccgtaatggacaagatcctgaagaaatgcctttcaaatcagaaaacaacatagattcgatagagaaagttcccaagcccgatggtgagagagtcacgcttactagctccgggtctgataacgtaaagagaaattcaaaacacgccccattcattcctgtgaaacctgctctagaaaaatttccttcttctaatagattgtcaagagattacagaaaatcacaagagcctaccctgtttaacggtgatagattagttcctactcttcctactgtgagtaggatatcgacatcttcttccgtcggttcctctacagcggcttcaagatatttcaatccgtccaaaagagctgttgttgcatcatcatcatcatcgtcgtcgtcaataaaattcaattcgctgcacgcaataccacttgatgcaactcctcaaattgaattggcaaaacaacaagatgagatctccaaaaggaggttcggaagaaggcgcagtagaactgttgacgtatttgactatattaacaaaaacaatacagcaaagaacaaaccgccactctctccatcttcttttattaggactattgacgagaaaaatacaaattctcttatgcaagaccccatgggatcccgcggacctcttttgcccgatgatgccaatattataagcaatgatacagatggagcggaagcaagtcacccagaccatcaggttttatcaaggtctcgatctcaaagtacgtcttttgttcaaggcaagggcggcaagagaaaatcaattgaagatgaaggctaccataacaaattgggcctacctcatggatcaggccctacttcagtttacaacaataaaagcaatgccaattcaactattactggaatgtcaagaagaagtagctcaattgtgaatgctttaagtagttttgttaaccttcgctcctccagtttatcatcctctaggcaacagcaccttcaacaacaacagcagctacaacaaaaactggatgtctcgctggaagatctaccaccggttcccgcgcctgaatttagtgattcttgtaaggacttcttgattaaattagcgccctacggaaagttcattgggatcattttaacggaaaaagatgatgagttcaaaaaaaattgtttaaactacctattaacgaattgcttcgaatttaaaaatgaccctttagatattgccctgaggaaattgttgatgtttttagagcttccaaaggagacgcagcaaattgatagattgataatggcttttagctttgcatactataaggcccaaaagagctattctaagaaaaaaggaattgagtgcccctggtctaatgcagaccaggtgtattttattgcattttccttactaatgttgcacactgattactttaaccccaacaataaaagcaaaatgacaaagcatgatttcgtggatttagtccataatgacaaatactcaggaggtaatgagatccctatggccgttttgacatatttttatgagaatgtgacagccaaagagtcgccgaaatttaattactttttgatgtcaccaatggcgttggacgatagcatccttgataaagatgcatttgacacaaattttgctatcacattatcttcgaattcgatgtattctcccatagacatgataaaaagggggagtataatacccaaggaagcttccctttccccaatcttttatccgctaacgaattcaattagtgcatctggtattgccccatctacggcggcttcttgcccaccaagtacgtcgggtactataaacggggccaacctcggaacggctaacagtaatagcaatagaccggcttctaactcaatatcgtcttatttttcatataatccaagctctagttctagcggaaatgctacgttagttcaagatgacattaacgtttattcgcacattataaatgatacattaaatgaagtaaatctatttccagaagtctcaaaatattggaataagaatgctctgaaggcaaatttgttgagaaatgaagaacataaatacgaaaaatattatagtattatgaatgatactaaaggtgggtatttacgctttcacaaaagtcaattgaataaactgaatttacctaattttgaaatattgaatgataatagccggtctggatgcaagaactccgattataagtattgcaaaatccttcaaatgggagcaataatgaatttggggatgcccagtagaaaattttctattgttaactccgctaaaattcattggaaaaaggaatttgccatattaacatcattggggcttttgatctgcgataaaatggactggataaatccacagatgatgaaggacccaaaatcaggaactacaaactatataattgattttaaatcaggattttcttttgttccgggaagtacgattgacgtgtataacggtttatttgctgatagggagcgagattcacttgggaaatctcatttcgcaagtttggtacttgcgtatacagagcatcattctactgggagtcatacaagcaacacaactgcagcaagtagctccgccaaacacaatgaaggagtcttcgagccatcttcagatgaagaggatagcataacgaattctactgatggtacgagcagtgtgagtaacggcgagagtgacaacgatagtgtttctagttcagataatcaactcagttcaaatgacagtaatgaagattatcattccattaaggacgagtatccgattttcgaagacgaaaatgccgattgtctattatacttacatacatgtcatcgaaattttatctggaaatgtgctaataagtatgaaagggacaactggatcgattctatcaatctattttcagcatatgacggatgctatgtggaaattggtagtatagcaaacactatttgtaataagagaaagcttaccattttgcagaggatggaaagacttaggtctataaaatcagccaaatgggagaaattgaaaaaatttgaaagcactctgatgcttatgggaaaatgtgttcctattagcacaaagactaagacagatatgataaaccgcataagacagctggctgtcagaatggactggttaatctacgaaattaagagaagcgagctgtttgtaagtatcataaaagaagtgactcgcaagcaggctgaaaagaatatcttagagcatggtaaaggagaagaggaggggcaaggcaataacgacgatagtgatggtatagatgatatagaggaaagcttcttattcaacgagaacagtttgcaagtgtgcgtgagcgacagtagttacgacgaatatagtaacgaataa

SEQ ID NO: 11604 - DNA, 3681 bp, Artificial Sequence
  Description of Artificial Sequence: Synthetic polynucleotide
atgaatcagtctatttcttctttgattaagcttaaattccttcaatctcacagtaacgataaaaatggcaacaaaaagggcggaagcaatgtttctacaggcatagataaattaagagagagtgaaagttatagaagtccttttcttcaactcgcagaaatacaggaacacactaataatgacgacgataaacttgatgtaaaagaatgcgagcccacaaaaaaacacagcaaattaagcaggatacgtcgtaagatgggtaggttagacttgaatttcaggtctgccaatgaaaagggttctgaagatgatgaaatcttggttgcacaacacctccgtaatggacaagatcctgaagaaatgcctttcaaaagtgaaaacaacatagattctatagagaaagttcccaagcccgatggtgagagagtcacgcttactagctccgggtctgataacgtaaagagaaattctaaacacgccccattcattcctgtgaaacctgctttggaaaaatttccttcttctaatagattgtccagagattacagaaaatctcaagagcctaccttatttaacggtgatagattagttcctactcttcctactgtgagtaggatatctacatcttcttccgtcggttcctctacagcggcttccagatatttcaatccgtccaaaagagctgttgttgcatcttcttcttcttcttcttcttctataaaattcaattctttacacgcaataccacttgatgcaactcctcaaattgaattggcaaaacaacaagatgagatctccaaaaggaggttcggaagaaggcgcagtagaactgttgacgtatttgactatattaacaaaaacaatacagcaaagaacaaaccgccactctctccatcttcttttattaggactattgacgagaaaaatacaaattctcttatgcaagaccccatgggatcccgcggacctcttttgcccgatgatgccaatattataagcaatgatacagatggagcggaagcaagtcacccagaccatcaggttttatctaggtctcgttctcaaagtacgtcttttgttcaaggcaagggcggcaagagaaaatccattgaagatgaaggctaccataacaaattgggcttacctcatggatctggccctacttctgtttacaacaataaaagcaatgccaattctactattactggaatgagtagaagaagtagctctattgtgaatgctttaagtagttttgttaaccttcgctcctccagtttatcttcctctaggcaacagcaccttcaacaacaacagcagttacaacaaaaattggatgtctctttggaagatttaccaccggttcccgcgcctgaatttagtgattcttgtaaggacttcttgattaaattagcgccctacggaaagttcattgggatcattttaacggaaaaagatgatgagttcaaaaaaaattgtttaaactacttattaacgaattgcttcgaatttaaaaatgaccctttagatattgccttaaggaaattgttgatgtttttagagcttccaaaggagacgcagcaaattgatagattgataatggcttttagctttgcatactataaggcccaaaagagctattctaagaaaaaaggaattgagtgcccctggtctaatgcagaccaggtgtattttattgcattttccttattgatgttgcacactgattactttaaccccaacaataaaagcaaaatgacaaagcatgatttcgtggatttagtccataatgacaaatactccggaggtaatgagatccctatggccgttttgacatatttttatgagaatgtgacagccaaagagtctccgaaatttaattactttttgatgtctccaatggcgttggacgatagcatccttgataaagatgcatttgacacaaattttgctatcacattatcttccaattctatgtattctcccatagacatgataaaaagggggagtataatacccaaggaagcttccctttccccaatcttttatccgttaacgaattctattagtgcatctggtattgccccatctacggcggcttcttgcccaccaagtacgtctggtactataaacggggccaacctcggaacggctaacagtaatagcaatagaccggcttctaacagcatatcttcttatttttcttataatccaagctctagttctagcggaaatgctacgttagttcaagatgacattaacgtttattctcacattataaatgatacattaaatgaagtaaatttatttccagaagtctccaaatattggaataagaatgctttgaaggcaaatttgttgagaaatgaagaacataaatacgaaaaatattatagtattatgaatgatactaaaggtgggtatttacgctttcacaaaagtcaattgaataaattgaatttacctaattttgaaatattgaatgataatagcagatctggatgcaagaactccgattataagtattgcaaaatccttcaaatgggagcaataatgaatttggggatgcccagtagaaaattttctattgttaactccgctaaaattcattggaaaaaggaatttgccatattaacatctttggggcttttgatctgcgataaaatggactggataaatccacagatgatgaaggacccaaaaagtggaactacaaactatataattgattttaaaagtggattttcttttgttccgggaagtacgattgacgtgtataacggtttatttgctgatagggagagagattctcttgggaaatctcatttcgcaagtttggtacttgcgtatacagagcatcattctactgggagtcatacaagcaacacaactgcagcaagtagctccgccaaacacaatgaaggagtcttcgagccatcttctgatgaagaggatagcataacgaattctactgatggtacgagcagtgtgagtaacggcgagagtgacaacgatagtgtttctagttctgataatcaactcagtagtaatgacagtaatgaagattatcattccattaaggacgagtatccgattttcgaagacgaaaatgccgattgtcttttatacttacatacatgtcatagaaattttatctggaaatgtgctaataagtatgaaagggacaactggatcgattctatcaatttattttctgcatatgacggatgctatgtggaaattggtagtatagcaaacactatttgtaataagagaaagcttaccattttgcagaggatggaaagacttaggtctataaaaagtgccaaatgggagaaattgaaaaaatttgaaagcactttaatgcttatgggaaaatgtgttcctattagcacaaagactaagacagatatgataaaccgcataagacagttagctgtcagaatggactggttaatctacgaaattaagagaagcgagttatttgtaagtatcataaaagaagtgactcgcaagcaggctgaaaagaatatcttagagcatggtaaaggagaagaggaggggcaaggcaataacgacgatagtgatggtatagatgatatagaggaaagcttcttattcaacgagaacagtttgcaagtgtgcgtgagcgacagtagttacgacgaatatagtaacgaatga

SEQ ID NO: 11605 - DNA, 303 bp, Saccharomyces cerevisiae
atgagaggcgaaacaggcgtaagcattaaaaacccaaggccatctcgtcctttttcttgtttttggcgtaaaggagatgttgaaaatattaggaaaagtgatatagggaacgaaaagaaaatagacgctaagttcaacaggcttcagtataatctatattacaagcctctctcgcaccacaaggccggtttattgtacaaagaactcttcttcagaagctgcttctcttatactacctgctcattagactttcagggtaaaaggcaccaagtggaaagaaaggcagtagatatagtactttga

SEQ ID NO: 11606 - DNA, 303 bp, Artificial Sequence
  Description of Artificial Sequence: Synthetic polynucleotide
atgagaggcgaaacaggcgtaagcattaaaaacccaaggccatctcgtcctttttcttgtttttggcgtaaaggagatgttgaaaatattaggaaaagtgatatagggaacgaaaagaaaatagacgctaagttcaacaggcttcagtataatttatattacaagcctctcagtcaccacaaggccggtttattgtacaaagaactcttcttcagaagctgcttctcttatactacctgctctttagactttcagggtaaaaggcaccaagtggaaagaaaggcagtagatatagtactttga

SEQ ID NO: 11607 - DNA, 3222 bp, Saccharomyces cerevisiae
atgattactcaagacactcctgctttaaatccaacggaagaacactacctgaagagggaactgcttcgatgtcaattggattatgaaattggaaagcttaacgatcagtttgctttgagaaagttcggttatcctttctcaccaaacgatccgacagctccacagcctatctccaataacgattcatcaccagtgctcggtggcaaaggccattttagcgttaattatcccatgctgagttatgttttgcaagaatttatatccacatttcctttactttcaacaaatttgctagttgatgaaaaattctggcagagtaaggttcaagtgttctttgaacatttcatgagtcttgggtttagtgaaagttatgacagggaggaagcttcaaaaaggaagaaagtttccaaaaagctatcaaaggttatcttgttgctctttaactccggtgttggctcttttcaagagcaagcgtattataatgaggataaattcgttttacagtcaggccaagcgagaaaacgctctaatattgagaaatttgcaatgccaactagagaaaatttagagaatttgctcactaacgaatccgtttttattaacggttgggacgtcaatattatatccgtgttcaataagaattcacggaaatgtactgaaagtgtggataatgacaagtctagtaaatctactccaacttcgagtcccaaaagccatgctataaaatcatttgcttccacttctaaatggatgaagaatgccttcaacaacactattaacagtaccataaatagtatgcccgaatcctcagcatctttattttcgaaattatcccttggcgtgccttcaactaagagcaagcaatctagaaaacatcattatttcttgattaagattaagaagcaagatgacgacgaccaagataacagcaatgaagagaatagtaatcttgatcaccatgctggttatttctatgtgacaagaacatacagcgacttcaaaaaactatctcatgatttaaaatcagaatttccggggaagaaatgtccgcgcttacctcatagaaataaaaaagtgacgtctatgataactaaaaccgaagtgttacacaatgggcaaactaaatcagcagccagggaaaaaatcgtcaacacttttgacactgatttacaatctgcatcagagtctgataattcttcatttttacagacaacgaatgaattatctgctacagaaacagtactcacagaaaaagaaactgaaacgttgagaaaaaatattctaaatgagatcaaggaagaagataatattgatgaggacgagtatgaggaagaaggtgaaggtgaagaaagtgattttgatgaatataaagatgcatccgattcaaaaatcaatactttggtgggtgaaaaaatgagaacttcattaagacaatatttaaggactttgtgtaaagatgcagaggtttctcaaagctcatctattcgtcgcttcttcctaagtgggcctaatttagatattaaggacataaatccgaaaatagcagatgacattagaaacagggctctgatagatgtaagtaatttggagaaccaaatacgtttccaacagatggcgttagaaaagtctttaaagctgcaagactcaatgaaagatttcaaaacatccctgttaaaagatgaaaaatacttgatgagtctactagtagaaatcaaggacaatacgaaagttgaagacctgtcaccacttttacaagactttgtggaatggtgtaagatttatatttcctcaatgatttatcaaatgtttctgggtaacgataacagttatgaactctatacacaaataagacggttacataagcttatgccgtacacagtaatgggacagatcatgaaatttactaatccaatagcgatcatgaggggtatgattgaattatttatggcacaacccttcggtggtcattcgctccttcaaacaatgttttctacgatattaacagatgatttgaaaactcaaaaggtagctataaaggaattagaaaggaaaattgctgagatggacccgggcgcttcagttgtgactaaatgcttgaaggattttgtctttaataatgatactaaggatgagcatgatactaaactctttactatggacgcagtaaatgcagaatccgaatccatgaacatgcctgtaccattgatagtattaatgaaaagtgcagctgcaaatctaattccagacgaggttgtcgcgggacttattgaatcctattcatcatggaaactgcaaaaagaagacacggatgccttgaatgtaaccagcgaagatcagtcaggtatttatttcacacacgtcaaagatttatggcaattgtatattaaagaacatgataaacagctaatgaggcagctatggcaagatcctgagttaacccaaatgctaaaggcaattgtcactatgatttacgaacctatggtcaagatcttcaaagttgcaaggatggatgttgctttgaaaaattttgagaagttcatgagtgatttgatcaggcttgttgatgatgttatcaatggtcagttgggcgtttccacacagttcgatgtcgtggaagaaatccataacttagtaaccaaacatcaagatgccttttttgagtttattcatgatgtatatttgaacgattcagagggcatttttgaaggttttattacttggattactacgatagtgaaatttttgcaaaagagtaaattcggaggaccgagtgaaaggatcgacttcaataagttaatttgtagagatgatatcgatattgatgtcaaacttttgaaagttcaagttaataatgttcttaataaaaagattggtgcgagaaaaatctataagaagttgttagatttgaaggttaaacaaggtactaaacaaaataacaaacacgctgctggcatacttcaaaagaattggagtgacataaactccttggttatgccatccagctctggatcttttggacttggagatggtgatttggtggatttggatctcgatacaggtgattacgattttttacataaagagaatgaagttgaattagaaaagcaatacaaagatttattgaatcttgttgttgatgaaagtgaaattgataaattgagatctcaagttttcgcacaggaattaaaaaattatttagaagctcaaattgctaaaaagtag

SEQ ID NO: 11608 - DNA, 3222 bp, Artificial Sequence
  Description of Artificial Sequence: Synthetic polynucleotide
atgattactcaagacactcctgctttaaatccaacggaagaacactacttgaagagggaattgcttcgctgtcaattggattatgaaattggaaagcttaacgatcagtttgctttgagaaagttcggttatcctttctctccaaacgatccgacagctccacagcctatctccaataacgattcttctccagtgctcggtggcaaaggccattttagcgttaattatcccatgttaagttatgttttgcaagaatttatatccacatttcctttactttctacaaatttgttggttgatgaaaaattctggcagagtaaggttcaagtgttctttgaacatttcatgagtcttgggtttagtgaaagttatgacagggaggaagcttccaaaaggaagaaagtttccaaaaagttatccaaggttatcttgttgctctttaactccggtgttggctcttttcaagagcaagcgtattataatgaggataaattcgttttacagtctggccaagcgagaaaacgctctaatattgagaaatttgcaatgccaactagagaaaatttagagaatttgctcactaacgaatccgtttttattaacggttgggacgtcaatattatatccgtgttcaataagaattccagaaaatgtactgaaagtgtggataatgacaagtctagtaaatctactccaacttctagtcccaaaagccatgctataaaaagttttgcttccacttctaaatggatgaagaatgccttcaacaacactattaacagtaccataaatagtatgcccgaatcctctgcatctttattttccaaattatcccttggcgtgccttccactaagagcaagcaatctagaaaacatcattatttcttgattaagattaagaagcaagatgacgacgaccaagataacagcaatgaagagaatagtaatcttgatcaccatgctggttatttctatgtgacaagaacatacagcgacttcaaaaaattatctcatgatttaaaaagtgaatttccggggaagaaatgtccgcgcttacctcatagaaataaaaaagtgacgtctatgataactaaaaccgaagtgttacacaatgggcaaactaaatctgcagccagggaaaaaatcgtcaacacttttgacactgatttacaatctgcaagtgagtctgataattcttcttttttacagacaacgaatgaattatctgctacagaaacagtactcacagaaaaagaaactgaaacgttgagaaaaaatattttgaatgagatcaaggaagaagataatattgatgaggacgagtatgaggaagaaggtgaaggtgaagaaagtgattttgatgaatataaagatgcatccgattctaaaatcaatactttggtgggtgaaaaaatgagaacttctttaagacaatatttaaggactttgtgtaaagatgcagaggtttctcaaagctcttctattcgtcgcttcttcttaagtgggcctaatttagatattaaggacataaatccgaaaatagcagatgacattagaaacagggctttaatagatgtaagtaatttggagaaccaaatacgtttccaacagatggcgttagaaaagtctttaaagttacaagactccatgaaagatttcaaaacatccttattaaaagatgaaaaatacttgatgagtttattggtagaaatcaaggacaatacgaaagttgaagacttatctccacttttacaagactttgtggaatggtgtaagatttatatttcctctatgatttatcaaatgtttttaggtaacgataacagttatgaactctatacacaaataagaagattacataagcttatgccgtacacagtaatgggacagatcatgaaatttactaatccaatagcgatcatgaggggtatgattgaattatttatggcacaacccttcggtggtcattctctccttcaaacaatgttttctacgatattaacagatgatttgaaaactcaaaaggtagctataaaggaattagaaaggaaaattgctgagatggacccgggcgcttctgttgtgactaaatgcttgaaggattttgtctttaataatgatactaaggatgagcatgatactaaactctttactatggacgcagtaaatgcagaatccgaatccatgaacatgcctgtaccattgatagtattaatgaaaagtgcagctgcaaatttaattccagacgaggttgtcgcgggacttattgaatcctattcttcttggaaattacaaaaagaagacacggatgccttgaatgtaaccagcgaagatcagtctggtatttatttcacacacgtcaaagatttatggcaattgtatattaaagaacatgataaacagttgatgaggcagttatggcaagatcctgagttaacccaaatgttgaaggcaattgtcactatgatttacgaacctatggtcaagatcttcaaagttgcaaggatggatgttgctttgaaaaattttgagaagttcatgagtgatttgatcaggcttgttgatgatgttatcaatggtcagttgggcgtttccacacagttcgatgtcgtggaagaaatccataacttagtaaccaaacatcaagatgccttttttgagtttattcatgatgtatatttgaacgattctgagggcatttttgaaggttttattacttggattactacgatagtgaaatttttgcaaaagagtaaattcggaggaccgagtgaaaggatcgacttcaataagttaatttgtagagatgatatcgatattgatgtcaaacttttgaaagttcaagttaataatgttcttaataaaaagattggtgcgagaaaaatctataagaagttgttagatttgaaggttaaacaaggtactaaacaaaataacaaacacgctgctggcatacttcaaaagaattggagtgacataaactccttggttatgccatccagctctggatcttttggacttggagatggtgatttggtggatttggatctcgatacaggtgattacgattttttacataaagagaatgaagttgaattagaaaagcaatacaaagatttattgaatcttgttgttgatgaaagtgaaattgataaattgagatctcaagttttcgcacaggaattaaaaaattatttagaagctcaaattgctaaaaagtga

SEQ ID NO: 11609 - DNA, 486 bp, Saccharomyces cerevisiae
atgtgtttagtcaaaactacggctcatttgcttttttattcctttgtatttggaggaacgacgttttattcctatgtagcttctccaatcgcattcaaagttcttgaaaaagaccaattttctgctttgcaaaataagatcttcccgtattttttccaaatgcaagcggcatcacctgtcatcctggcccttaccgctccaattgccttgacaacaggaccattatcttctttggtggttgcatctgtcagtgggctaaccaatttgttttggttgttgccctggacccataaagttaaagaacaaagaaagaatattgcgaagaaatacacgggtagtgaattggaagcaaaggatgctatattacgtaaagaatttggcaagtcgcacggattgagtcttttgttcaatctttctaatgtttgcgggatgcttgcgtacggtgtttgtttgtcaggtggtttgttaagaaaaattccaaaataa

SEQ ID NO: 11610 - DNA, 486 bp, Artificial Sequence
  Description of Artificial Sequence: Synthetic polynucleotide
atgtgtttagtcaaaactacggctcatttgcttttttattcctttgtatttggaggaacgacgttttattcctatgtagcttctccaatcgcattcaaagttcttgaaaaagaccaattttctgctttgcaaaataagatcttcccgtattttttccaaatgcaagcggcatctcctgtcatcttggcccttaccgctccaattgccttgacaacaggaccattatcttctttggtggttgcatctgtcagtgggttaaccaatttgttttggttgttgccctggacccataaagttaaagaacaaagaaagaatattgcgaagaaatacacgggtagtgaattggaagcaaaggatgctatattacgtaaagaatttggcaagtctcacggattgagtcttttgttcaatctttctaatgtttgcgggatgcttgcgtacggtgtttgtttgtctggtggtttgttaagaaaaattccaaaatga

SEQ ID NO: 11611 - DNA, 357 bp, Saccharomyces cerevisiae
atgtctccatcagaatccttcaatagctttagcttgttttctacattgtcaatgttcaagtttctcacacaaataactttttcacgcccatttgtgtattctgccctcaacaaaggatgtccagacttcctcatcacttcaaactgtatccatgggaactcctggccccatttatctaatctctttgaagtcaaaaatttcctcatgccttccgaagaccctccccagttacagaattgcaaagtaatctttctgcatggaaacacgaatgctccaactccattacgacctatggaatttcgtgcaatagctttcacaaccatttctccatatattcgtgtctgtgtatctacttag

SEQ ID NO: 11612 - DNA, 357 bp, Artificial Sequence
  Description of Artificial Sequence: Synthetic polynucleotide
atgtctccatctgaatccttcaatagctttagcttgttttctacattgtccatgttcaagtttctcacacaaataacttttagccgcccatttgtgtattctgccctcaacaaaggatgtccagacttcctcatcacttctaactgtatccatgggaactcctggccccatttatctaatctctttgaagtcaaaaatttcctcatgccttccgaagaccctccccagttacagaattgcaaagtaatctttttacatggaaacacgaatgctccaactccattaagacctatggaatttcgtgcaatagctttcacaaccatttctccatatattcgtgtctgtgtatctacttga

SEQ ID NO: 11613 - DNA, 423 bp, Saccharomyces cerevisiae
atggttgtgaaagctattgcacgaaattccataggtcgtaatggagttggagcattcgtgtttccatgcagaaagattactttgcaattctgtaactggggagggtcttcggaaggcatgaggaaatttttgacttcaaagagattagataaatggggccaggagttcccatggatacagtttgaagtgatgaggaagtctggacatcctttgttgagggcagaatacacaaatgggcgtgaaaaagttatttgtgtgagaaacttgaacattgacaatgtagaaaacaagctaaagctattgaaggattctgatggagacattttacgcagaagaacaaagaatgataacgtggaaagcttgaacagtagtgtgaggggtatatggtcgcctctgcatgctgcgaaaaggcatagaatttag

SEQ ID NO: 11614 - DNA, 423 bp, Artificial Sequence
  Description of Artificial Sequence: Synthetic polynucleotide
atggttgtgaaagctattgcaagaaattccataggtcgtaatggagttggagcattcgtgtttccatgcagaaagattactttgcaattctgtaactggggagggtcttctgaaggcatgaggaaatttttgacttctaagagattagataaatggggccaggagttcccatggatacagtttgaagtgatgaggaagtctggacatcctttgttgagggcagaatacacaaatgggcgtgaaaaagttatttgtgtgagaaacttgaacattgacaatgtagaaaacaagttgaagttgttgaaggattctgatggagacattttacgcagaagaacaaagaatgataacgtggaaagcttgaacagtagtgtgaggggtatatggtctcctttgcatgctgcgaaaaggcatagaatttga

SEQ ID NO: 11615 - DNA, 528 bp, Saccharomyces cerevisiae
atggacggccttagctttgttgataaagggaaaataccagatggttacaaaaatgaaatagatcaattagtaaagaaggaatttgcgaatataaaaagagagcctgttcatcccgaaatacgaggtatacttgcgaagagaaagggggccgataatagtgtttctacgcttacaaatgcattgtacaccgaatacttgaaacaacgtaataacaaaaaaaggcgaacaccggattttaatgacgacgatgatactttatttttggaagagtatagaaggaaatacccgaggattgatacttccagatacataccgaacgagtcttccgaagttagcttgttaggaattgtagattcttatttaaaacatcaggaaatagttttggatacacttctaccgcaaacggtatcgaatcaatggagaattaataatgattatattcgtcaaacgtgtactatagtggaagaaatgaacatccagcagaggaaacaaattaacgatttggaaatatacagaaagaggttataa

SEQ ID NO: 11616 - DNA, 528 bp, Artificial Sequence
  Description of Artificial Sequence: Synthetic polynucleotide
atggacggccttagctttgttgataaagggaaaataccagatggttacaaaaatgaaatagatcaattagtaaagaaggaatttgcgaatataaaaagagagcctgttcatcccgaaataagaggtatacttgcgaagagaaagggggccgataatagtgtttctacgcttacaaatgcattgtacaccgaatacttgaaacaacgtaataacaaaaaaaggagaacaccggattttaatgacgacgatgatactttatttttggaagagtatagaaggaaatacccgaggattgatacttccagatacataccgaacgagtcttccgaagttagcttgttaggaattgtagattcttatttaaaacatcaggaaatagttttggatacacttttgccgcaaacggtatctaatcaatggagaattaataatgattatattcgtcaaacgtgtactatagtggaagaaatgaacatccagcagaggaaacaaattaacgatttggaaatatacagaaagaggttatga

SEQ ID NO: 11617 - DNA, 525 bp, Saccharomyces cerevisiae
atgtctgccaaagctcaaaaccctatgcgtgatttgaagatcgaaaagttggtcttaaacatttctgttggtgaatctggtgacagattgaccagagcctccaaggttttagagcaattatctggtcaaactccagttcaatccaaggccagatacactgtcagaactttcggtatcagaagaaacgaaaaaattgctgttcacgttaccgtcagaggtccaaaggctgaagaaattttggaaagaggtttgaaggtcaaggaataccaattgagagacagaaacttctctgctaccggtaacttcggtttcggtattgacgaacacattgacttgggtatcaagtatgacccatccatcggtattttcggtatggatttctatgtcgtcatgaacagaccaggtgctagagtcactagaagaaagagatgtaagggtaccgttggtaactcccacaagacaactaaggaagacaccgtctcttggttcaagcaaaagtacgatgctgatgttttggacaaataa

SEQ ID NO: 11618 - DNA, 525 bp, Artificial Sequence
  Description of Artificial Sequence: Synthetic polynucleotide
atgtctgccaaagctcaaaaccctatgcgtgatttgaagatcgaaaagttggtcttaaacatttctgttggtgaatctggtgacagattgaccagagcctccaaggttttagagcaattatctggtcaaactccagttcaatccaaggccagatacactgtcagaactttcggtatcagaagaaacgaaaaaattgctgttcacgttaccgtcagaggtccaaaggctgaagaaattttggaaagaggtttgaaggtcaaggaataccaattgagagacagaaacttctctgctaccggtaacttcggtttcggtattgacgaacacattgacttgggtatcaagtatgacccatccatcggtattttcggtatggatttctatgtcgtcatgaacagaccaggtgctagagtcactagaagaaagagatgtaagggtaccgttggtaactcccacaagacaactaaggaagacaccgtctcttggttcaagcaaaagtacgatgctgatgttttggacaaatga

SEQ ID NO: 11619 - DNA, 864 bp, Saccharomyces cerevisiae
atgcaagctattgccgatagtttcagtgtaccaaacagattggttaaggaacttcaatatgacaacgaacaaaacttagagagcgatttcgtaacgggcgcctcccagtttcaacgtttggcaccatcgcttacggttccaccaattgcgtctccacagcagtttttaagagcacacacagatgattcacgaaacccagactgtaaaatcaagatcgcacatggtactacaaccttagcatttagatttcaaggcggtattattgtggcagtagattctcgtgccactgccggcaattgggttgcttctcaaactgtgaagaaagttattgagatcaacccatttttattgggtacaatggctggtggtgcggcagattgtcaattttgggaaacttggctaggttctcagtgtaggctgcacgagctgagggaaaaggaacgtatatctgtcgcagccgcatccaagattttaagcaatttagtataccaatataaaggggccggtttatcaatgggtactatgatctgtggttacactaggaaggagggcccaaccatttattacgtcgactcagacggtacaagattaaaaggtgacatattctgcgttggttcaggtcaaacatttgcatatggtgttctagactctaactataaatgggatttatccgttgaagatgctttatatctaggtaagagatctattttagctgctgcccatagagatgcttactctggtggttctgtaaatttatatcatgttaccgaggatggttggatatatcacggtaatcatgacgtaggtgaactattttggaaggtcaaggaagaggaaggatctttcaacaacgttattggctaa

SEQ ID NO: 11620 - DNA, 864 bp, Artificial Sequence
  Description of Artificial Sequence: Synthetic polynucleotide
atgcaagctattgccgatagtttcagtgtaccaaacagattggttaaggaacttcaatatgacaacgaacaaaacttagagagcgatttcgtaacgggcgcctcccagtttcaacgtttggcaccaagtcttacggttccaccaattgcgtctccacagcagtttttaagagcacacacagatgattctagaaacccagactgtaaaatcaagatcgcacatggtactacaaccttagcatttagatttcaaggcggtattattgtggcagtagattctcgtgccactgccggcaattgggttgcttctcaaactgtgaagaaagttattgagatcaacccatttttattgggtacaatggctggtggtgcggcagattgtcaattttgggaaacttggttaggttctcagtgtaggttacacgagttgagggaaaaggaacgtatatctgtcgcagccgcatccaagattttaagcaatttagtataccaatataaaggggccggtttatctatgggtactatgatctgtggttacactaggaaggagggcccaaccatttattacgtcgacagtgacggtacaagattaaaaggtgacatattctgcgttggttctggtcaaacatttgcatatggtgttttggactctaactataaatgggatttatccgttgaagatgctttatatttgggtaagagatctattttagctgctgcccatagagatgcttactctggtggttctgtaaatttatatcatgttaccgaggatggttggatatatcacggtaatcatgacgtaggtgaattattttggaaggtcaaggaagaggaaggatctttcaacaacgttattggctga

SEQ ID NO: 11621 - DNA, 2811 bp, Saccharomyces cerevisiae
atggatggggaaatggcaataatagaaagcagcaatcatgtcgggacttcatcgcctaccactgaaacacagtttactatagattcttccgcattgaaagaccaagaaaccaaagaaagcataacaaattcaccgacaagcgaggtaccgattgaaacaaaactaccaaaaagttctgatatagtaacagaggaaaaacatcctcaaaacacgactactgatattgaaaacgaggtagagaatcctgttacagacgataatggaaatttgaaacttgaattacctgataaccttgataacgctgatttttcgaagctactggaatttgatgcaaaaaatgatgaagctctgttcaactcaaatgagttgttatcccacaccatggatcctgtaaataacatcgatttaactcatgatcacagcagggaggtttcatcaaaagaagatatcaatatagagccagtaaaccctgatgaggacgaaagggagaaaactcaagataacacagcagcagtgaaaactgaaggcataaggaactcagaagatacaagtatacaaaaggatgaacccactgctgatgctatatacacagatgtgcataaattatcagtaaacaaagataccgagaccctaccaacattagtagatgaaaaaaacaacatgctgcatatgagaaacaattcaataacgccaataatgtttcagcagcatgaattagtgggacaaccgccacaaaacactgtaacggaaaataatagtacagatgctgaaactacccaacgaaaactatctgagccaatcgatgcaagtttaccgctaccgaatgaacaaccgactatcttcgcctatgcaaggctggactttcaaagtttcacattttatgtacaaacattacatgcaataatcggaaggaggtctgagaatgacttctcccacaaagttgacgttaatcttggtccttcaaaatcaatatcgaggagacacgcccagattttttacaattttgggacaggaaggttcgaattgtccataatagggaagaatggtgcttttgtggatgacattttcgttgaaaaaggaaatactgtgccacttcgtaataagacaaaaattcaaattggacaaattccatttcaatttattttaccagaacaagaacgtaacgacgatagcaaaagcccagaaaacgctgacatagcagaatctgaaataaatacaagaaatctcaaaaaaaacgagcccaaatctaagaaaaagattacaactggagcaaagcccaagaaagcgcagaccaaaccagctgttaagaaagaaaagaagccaccgaaaataccaaagaaagtatatactttggaggagattccagtagaatatagaacgaaacctactgtatcttactctgctatgctaactacttgcatacgaaagtactcgactgccaagggaatgtctttatctgaaatttatgcaggaataagagaactcttcccctattataaatactgtcctgatgggtggcaaagctcggtaagacacaacttatcgctaaataaatctttcaggaaggtttctaaagaaggcaaaggatggttatggggtcttgatgaagaatatattgcagagagggaacgacagaaaaagaaacaaagtgagatagctgtggcaaaggcacaagctgcacaattaaaacttgaacagcaacagcacaaacttcagcaagtgccgcagaggggcaaaaaagatattgtttcgcagagatctaacgttaatgcgagaaaacaaaacatctcacaaactcttgcagcaaacagagccgcctcgaacaggaaaaatacagcaagtgataatcaaaggacaatgaaatatctgcaggaacagcttgtcattttaacacgagatagaaagggtttatcgaagcaggtcatcgctgcaattttgacgcaggctctagctatgacaataaatcaggttacacaagcggcaaaaaacaaggggattactggtaatccacttacagccttgatggacaagaatcctcagcatttgaatctaattttagcagctgctgtaaacgcggcaactgcaaaagtcacaaaaggtgaggtaaagcaattagtgaaccctgaaactacagcggcggcggctttagcagctaaggcacagcattccaaaccgatacgccaaccaatagtccagacgccgcatgtaccagataggcctccatctcagttatctgcgtcggcatcatcccatcccaataattacttgcatgataaacaaccgggatcgtttgatccttcgtccttgtctcgattttttcaaccgagacaaaatgctagggctacatcctctgtggcagctacgtcagttccggcggctgcttctcaaaatgttgatgcacaacccaaacctaagcctgcacaggacaacgacttagaaagtgaaagcggcactagtagtagtagcagttccagtagtgagagcggaagcgagagcgatagtggtagcgatgacggtagtgctagtggaagcggcgataatagcagcactagtagtgaaagcgaaagcgaaagtgatagtggaagcgaagtagatgaaaagaacaacaaaaacgaaaagatcgatagtgaaagtattaaaaacaacgaatctaaagatgatattccatctaaagacgagaatagtagcaatgataatcgcgagatttcaaaaaccgacgaagaaggtcatgattctaaaaggcggaaggtcagcgaggatatcaacgagggtatcactgaagtaaatgtatcccttgaggaaaaactttaa

SEQ ID NO: 11622 - DNA, 2811 bp, Artificial Sequence
  Description of Artificial Sequence: Synthetic polynucleotide
atggatggggaaatggcaataatagaaagcagcaatcatgtcgggacttcttctcctaccactgaaacacagtttactatagattcttccgcattgaaagaccaagaaaccaaagaaagcataacaaattctccgacaagcgaggtaccgattgaaacaaaattaccaaaaagttctgatatagtaacagaggaaaaacatcctcaaaacacgactactgatattgaaaacgaggtagagaatcctgttacagacgataatggaaatttgaaacttgaattacctgataaccttgataacgctgatttttccaagttattggaatttgatgcaaaaaatgatgaagctttattcaacagtaatgagttgttatcccacaccatggatcctgtaaataacatcgatttaactcatgatcacagcagggaggtttcttctaaagaagatatcaatatagagccagtaaaccctgatgaggacgaaagggagaaaactcaagataacacagcagcagtgaaaactgaaggcataaggaactctgaagatacaagtatacaaaaggatgaacccactgctgatgctatatacacagatgtgcataaattaagtgtaaacaaagataccgagaccttgccaacattagtagatgaaaaaaacaacatgttgcatatgagaaacaattctataacgccaataatgtttcagcagcatgaattagtgggacaaccgccacaaaacactgtaacggaaaataatagtacagatgctgaaactacccaaagaaaattatctgagccaatcgatgcaagtttaccgttaccgaatgaacaaccgactatcttcgcctatgcaaggttggactttcaaagtttcacattttatgtacaaacattacatgcaataatcggaaggaggtctgagaatgacttctcccacaaagttgacgttaatcttggtccttccaaatctatatctaggagacacgcccagattttttacaattttgggacaggaaggttcgaattgtccataatagggaagaatggtgcttttgtggatgacattttcgttgaaaaaggaaatactgtgccacttcgtaataagacaaaaattcaaattggacaaattccatttcaatttattttaccagaacaagaacgtaacgacgatagcaaaagcccagaaaacgctgacatagcagaatctgaaataaatacaagaaatctcaaaaaaaacgagcccaaatctaagaaaaagattacaactggagcaaagcccaagaaagcgcagaccaaaccagctgttaagaaagaaaagaagccaccgaaaataccaaagaaagtatatactttggaggagattccagtagaatatagaacgaaacctactgtatcttactctgctatgttgactacttgcataagaaagtactccactgccaagggaatgtctttatctgaaatttatgcaggaataagagaactcttcccctattataaatactgtcctgatgggtggcaaagctctgtaagacacaacttaagtttgaataaatctttcaggaaggtttctaaagaaggcaaaggatggttatggggtcttgatgaagaatatattgcagagagggaaagacagaaaaagaaacaaagtgagatagctgtggcaaaggcacaagctgcacaattaaaacttgaacagcaacagcacaaacttcagcaagtgccgcagaggggcaaaaaagatattgtttctcagagatctaacgttaatgcgagaaaacaaaacatctctcaaactcttgcagcaaacagagccgcctccaacaggaaaaatacagcaagtgataatcaaaggacaatgaaatatttacaggaacagcttgtcattttaacaagagatagaaagggtttatccaagcaggtcatcgctgcaattttgacgcaggctttggctatgacaataaatcaggttacacaagcggcaaaaaacaaggggattactggtaatccacttacagccttgatggacaagaatcctcagcatttgaatttaattttagcagctgctgtaaacgcggcaactgcaaaagtcacaaaaggtgaggtaaagcaattagtgaaccctgaaactacagcggcggcggctttagcagctaaggcacagcattccaaaccgatacgccaaccaatagtccagacgccgcatgtaccagataggcctccatctcagttatctgcgtctgcatcttcccatcccaataattacttgcatgataaacaaccgggaagttttgatccttcttccttgtctagattttttcaaccgagacaaaatgctagggctacatcctctgtggcagctacgtctgttccggcggctgcttctcaaaatgttgatgcacaacccaaacctaagcctgcacaggacaacgacttagaaagtgaaagcggcactagtagtagtagcagttccagtagtgagagcggaagcgagagcgatagtggtagcgatgacggtagtgctagtggaagcggcgataatagcagcactagtagtgaaagcgaaagcgaaagtgatagtggaagcgaagtagatgaaaagaacaacaaaaacgaaaagatcgatagtgaaagtattaaaaacaacgaatctaaagatgatattccatctaaagacgagaatagtagcaatgataatcgcgagatttccaaaaccgacgaagaaggtcatgattctaaaaggcgtaaggtcagcgaggatatcaacgagggtatcactgaagtaaatgtatcccttgaggaaaaactttga

SEQ ID NO: 11623 - DNA, 2586 bp, Saccharomyces cerevisiae
atggaagggcaaaaatcgaatgcatcatgggagagctcgatcatcgagggccaattgtctaaaaatctagcaaggtacaccttgttattagacaaattatcgacactatctcaaatagacaagctgtctgaagtgatagccaatgattacgcaaaacaatctaaacaattaaatgcatttgtgcaacagtcgcaatcatcgctcaacaaagagtcccggaaattagaattgcaaagaactaaccttacgactactttgactcagtttcatgagactgtggccaccatttcttcttcgaacgcaagagcaaaagctatacatgacgatattgaaactgtagatcaggaacgcgctttggtcaacaaaacgttacaatttgtaaaagacgtcaggacgctaaagaataatatttcactggcgcattctgctttagaaacaaaggattacttagttgctgcgacagcaatcaatgaaattagaagccttccggataaaaaacttattgtatccgagtttgccaagaaagttgtgccctcgagtgaaattcccgaagaaccagctatactaataaagaattggtgtaaggaactgacaagtttatttcaggagcaattcatggaagcaacaagaacacaggatattaaagagctaaccttaatgttcaaaatgttccctatgattgggcaggacgtacttggtttagacctgtattccaaatatgtctgtgatattattgcggacgaaagcaggaaaattatgtcgaattctatggaaaacagcaccaagtttcaaggatttttttcacaagtactgttacatctttttaaaattgtatcgaccattataaatgatcattcaaaagtcatcgccacgtgttatggaaaaaagcacatggtgcatgtcatggaaaaagtagaaaaagaagctgatcttcaagctagtttgattctagatatttttatggagacgaggaaaatagaaaggactatacatgatataaatgaatgggaacattcacaaaagaatgaagatgtgaatatagacagtaatcagtcggatatcgaaacagacggagaaacggaaaagagctcaattatatccattcatgacttggcattattgataatggaattttctcaaatacttcaaaattggtccatgtattctagattttattcagttaaatggaatgaatttagcgatttgcatccgcatgtattgcaaccacctccaccaatagcagatggtaaatttgccttaaagttaaagcaagataaggtctttgatgagtttcaggtgtttgtgttgaaccatctgcagagatcatttagaaatagtatttcactagaagaattaccgtcactgaacgatcttataactgctgttcccctcaatgaccacgataacatttcataccctgtaacatctgttttagatgacttaattttattagttcggaaaaatctgatatcagtggttaatactggccagtttaagctcttagcaagttttttgaacgagttggtaaaattttttcagaaccgatttctggtaaaatttatgcaaaacaaatttaagttactacaatcgaaactagcctccaatgtatctttgaaaagatacattccaaaaggtgaggagcaatctgcaacatcaagatcggtttctccacctgcaaataagttttctccgctaagcaggttcacttttagaggggcagcagctagcgctttgacaaatattcaatcaaatttacaagccgtagttgcagaggacgaggattccattcttgcgttgcaccattatttgatatatctgaacacgttgtacttgagtaaagtatacgttcacaggctgttatccatagaaatattagaagacgattcgcaaaggattttgagagacaatttcccttttgacaatgatgcagcgcagttacagaatttaattataaactcagaaaaattagtcctggaacaaacagataagctaagcaaatgggctgtcaaatacttgttccaaaatatcctacaaaatagggttcggaacttattgggaactgtttttgttaattcagcctcatcaaattcctcaacgtccaatcaaaaaaatgtgtctcgcgattattctgcaggttcgaaccaaaagaattacatcacaagcatagaagatttcgaagatttgtcgcaaattaacagtttcaatagcaaatggaaccaattgattatcccttacaaaaatattcttcacaacgaagcatatgcagagttgctatctgtcatagtcgactacatcgtaacaacattggagcaaagaatatggactctagaattcaatgaacttggtgttacgaaattagatagagaactgagccttttcatcggcaatatgtgtggcttgaactataatctcagagagaagttcttgaaattgacacaaatcgtgttgcttctcggtttagatgatgacaattttgatttgactacaggtgatatcaaggatgacttcaatggtactttcgattgggtgataaactctcaggaaagaattaaagctagaaatatgaagattgatagaacacagtaa

SEQ ID NO: 11624 - DNA, 2586 bp, Artificial Sequence
  Description of Artificial Sequence: Synthetic polynucleotide
atggaagggcaaaaatctaatgcatcttgggagagctctatcatcgagggccaattgtctaaaaatttggcaaggtacaccttgttattagacaaattatctacattatctcaaatagacaagttatctgaagtgatagccaatgattacgcaaaacaatctaaacaattaaatgcatttgtgcaacagtctcaatcttctctcaacaaagagtccagaaaattagaattgcaaagaactaaccttacgactactttgactcagtttcatgagactgtggccaccatttcttcttccaacgcaagagcaaaagctatacatgacgatattgaaactgtagatcaggaacgcgctttggtcaacaaaacgttacaatttgtaaaagacgtcaggacgttgaagaataatatttctttagcgcattctgctttagaaacaaaggattacttagttgctgcgacagcaatcaatgaaattagaagccttccggataaaaaacttattgtatccgagtttgccaagaaagttgtgcccagtagtgaaattcccgaagaaccagctatattaataaagaattggtgtaaggaattaacaagtttatttcaggagcaattcatggaagcaacaagaacacaggatattaaagagttgaccttaatgttcaaaatgttccctatgattgggcaggacgtacttggtttagacctttattccaaatatgtctgtgatattattgcggacgaaagcaggaaaattatgagtaattctatggaaaacagcaccaagtttcaaggatttttttctcaagtattgttacatctttttaaaattgtatctaccattataaatgatcattctaaagtcatcgccacgtgttatggaaaaaagcacatggtgcatgtcatggaaaaagtagaaaaagaagctgatcttcaagctagtttgattttagatatttttatggagacgaggaaaatagaaaggactatacatgatataaatgaatgggaacattctcaaaagaatgaagatgtgaatatagacagtaatcagagcgatatcgaaacagacggagaaacggaaaagagctctattatatccattcatgacttggcattattgataatggaattttctcaaatacttcaaaattggtccatgtattctagattttattctgttaaatggaatgaatttagcgatttgcatccgcatgtattgcaaccacctccaccaatagcagatggtaaatttgccttaaagttaaagcaagataaggtctttgatgagtttcaggtgtttgtgttgaaccatttacagagatcttttagaaatagtatttctttggaagaattaccgtccttgaacgatcttataactgctgttcccctcaatgaccacgataacatttcttaccctgtaacatctgttttagatgacttaattttattagttagaaaaaatttgatatctgtggttaatactggccagtttaagctcttagcaagttttttgaacgagttggtaaaattttttcagaacagatttttggtaaaatttatgcaaaacaaatttaagttattacaaagtaaattggcctccaatgtatctttgaaaagatacattccaaaaggtgaggagcaatctgcaacatctagatctgtttctccacctgcaaataagttttctccgttaagcaggttcacttttagaggggcagcagctagcgctttgacaaatattcaaagcaatttacaagccgtagttgcagaggacgaggattccattcttgcgttgcaccattatttgatatatttgaacacgttgtacttgagtaaagtatacgttcacaggttattatccatagaaatattagaagacgattctcaaaggattttgagagacaatttcccttttgacaatgatgcagcgcagttacagaatttaattataaactctgaaaaattagtcttggaacaaacagataagttgagcaaatgggctgtcaaatacttgttccaaaatatcttgcaaaatagggttagaaacttattgggaactgtttttgttaattctgcctcttccaattcctctacgtccaatcaaaaaaatgtgtctcgcgattattctgcaggttccaaccaaaagaattacatcacaagcatagaagatttcgaagatttgtctcaaattaacagtttcaatagcaaatggaaccaattgattatcccttacaaaaatattcttcacaacgaagcatatgcagagttgttatctgtcatagtcgactacatcgtaacaacattggagcaaagaatatggactttggaattcaatgaacttggtgttacgaaattagatagagaattgagccttttcatcggcaatatgtgtggcttgaactataatctcagagagaagttcttgaaattgacacaaatcgtgttgcttctcggtttagatgatgacaattttgatttgactacaggtgatatcaaggatgacttcaatggtactttcgattgggtgataaactctcaggaaagaattaaagctagaaatatgaagattgatagaacacagtga

SEQ ID NO: 11625 - DNA, 1332 bp, Saccharomyces cerevisiae
atgaacagtacacctcctacgtcacccgtcaccagggtttctgatggttcctttccatccataagtaacaatagtaagggttttgcttatcgccaaccgcaaaaacataaaagtaacttcgcatattcacatctggtatctcctgtagaggagccgacagctaaattcagtgaggcattccagacagattattctagtaaggcgcccgttgctacctcggaggcgcacctaaagaacgatttagacgtattgttcactaccccccggttttactctccggagaatttggctttaatgttccgtctttctaatacagtttcttccctagaatttctggatgagtttttgatgggcatattacttgctccagagatggattttttgtcaaatccaagttattctcttccgtctaacaaattagtgggacagggaagttattcatatgtgtaccctatatcatcaagtgcttcatcaagatgtaacaacgattcaggggttgttttaaagtttgccaaatcacagcataaaagcaaggtgattttacaggaagctttgacgctagcatatctccagtacatgagtccttcaaccaatgaaagtcatattattccattctatgggttgacatacataactaaatcccattttagaagactgaggtccaacgaatgtgttcctggccttattcttccgaaatgcgaaatgagtttatatcacttcaatacagcagtgtcacataagctttcgttgataacaaaaagaaaaatatggtggagacttatgaagcaaatgatagacgcattaaaatctttgaaaacaaatggtataattcatggtgatataaaaacagcaaatattttaataacagaaatgcatgttcttaatggaggccattgtaaggattttgacttctaccttgctgactttacgtcggcatttcacattaatcaaacaccaacagatctgaataccacggtagaatactgtgcaccagaactaattgatagctcctccgatcatgttcctacatttgaatcggatttgtatgccgtggggctttgtcttttatcatttatatcgcagcatgagccttacaacgaacttcaggcgttagtgtcgcatggatcctctccaggtattggcagttcatctatacagcagtcccaatggctgataaatgctcttttgaaaaaagatcctataaatctaaacatgttaagaaacgatttattccaggattggaagtcagaactagcattattgtccagaattctggttgatagacttcctctagaaaatctcataactatactcgatagtaactatatatga

SEQ ID NO: 11626 - DNA, 1332 bp, Artificial Sequence
  Description of Artificial Sequence: Synthetic polynucleotide
atgaacagtacacctcctacgtctcccgtcaccagggtttctgatggttcctttccatccataagtaacaatagtaagggttttgcttatcgccaaccgcaaaaacataaaagtaacttcgcatattctcatttggtatctcctgtagaggagccgacagctaaattcagtgaggcattccagacagattattctagtaaggcgcccgttgctacctctgaggcgcacttgaagaacgatttagacgtattgttcactacccccaggttttactctccggagaatttggctttaatgttccgtctttctaatacagtttcttccttagaatttttggatgagtttttgatgggcatattacttgctccagagatggattttttgagcaatccaagttattctcttccgtctaacaaattagtgggacagggaagttattcttatgtgtaccctatatcttccagtgcttcttctagatgtaacaacgattctggggttgttttaaagtttgccaaatctcagcataaaagcaaggtgattttacaggaagctttgacgttggcatatctccagtacatgagtccttctaccaatgaaagtcatattattccattctatgggttgacatacataactaaatcccattttagaagattaaggtccaacgaatgtgttcctggccttattcttccgaaatgcgaaatgagtttatatcacttcaatacagcagtgtctcataagctttctttgataacaaaaagaaaaatatggtggagacttatgaagcaaatgatagacgcattaaaatctttgaaaacaaatggtataattcatggtgatataaaaacagcaaatattttaataacagaaatgcatgttcttaatggaggccattgtaaggattttgacttctaccttgctgactttacgtctgcatttcacattaatcaaacaccaacagatttgaataccacggtagaatactgtgcaccagaattgattgatagctcctccgatcatgttcctacatttgaaagtgatttgtatgccgtggggctttgtcttttatcttttatatctcagcatgagccttacaacgaacttcaggcgttagtgtctcatggatcctctccaggtattggcagttcttctatacagcagtcccaatggttgataaatgctcttttgaaaaaagatcctataaatttgaacatgttaagaaacgatttattccaggattggaagtctgaattggcattattgtccagaattttggttgatagacttcctttggaaaatctcataactatactcgatagtaactatatatga

SEQ ID NO: 11627 - DNA, 627 bp, Saccharomyces cerevisiae
atgagcctaattcaccccgatacagcaaaatatccttttaaatttgaacctttcctcaggcaagagtattcgttttcactcgatcctgacagacctatttgtgaattttacaattctagagaaggccctaaatcatgtccgaggggaccgttatgtccaaaaaagcatgtgttaccaatatttcagaataaaattgtttgtagacattggcttcgagggttgtgcaaaaagaatgaccaatgtgaatacttacatgaatacaatcttcgaaaaatgcctgaatgtgtcttcttcagcaaaaacgggtactgtacacaaagtccagattgtcaatatctacacatagatcccgctagcaagataccaaaatgtgaaaattacgaaatgggattctgtcctctggggagttcttgtcctagacggcatattaagaaggttttctgtcaaagatacatgaccggattttgtcctttagggaaggatgaatgtgatatggaacatccacagttcataatcccagatgaaggtagtaaattaagaattaagagagacgatgagataaataccaggaaaatggatgaagaaaaggaaaggcgtttaaacgcaattataaacggtgaagtttga

SEQ ID NO: 11628 - DNA, 627 bp, Artificial Sequence
  Description of Artificial Sequence: Synthetic polynucleotide
atgagcttaattcaccccgatacagcaaaatatccttttaaatttgaacctttcctcaggcaagagtattctttttctctcgatcctgacagacctatttgtgaattttacaattctagagaaggccctaaaagttgtccgaggggaccgttatgtccaaaaaagcatgtgttaccaatatttcagaataaaattgtttgtagacattggcttagggggttgtgcaaaaagaatgaccaatgtgaatacttacatgaatacaatcttagaaaaatgcctgaatgtgtcttcttcagcaaaaacgggtactgtacacaaagtccagattgtcaatatttgcacatagatcccgctagcaagataccaaaatgtgaaaattacgaaatgggattctgtcctttagggagttcttgtcctagaagacatattaagaaggttttctgtcaaagatacatgaccggattttgtcctttagggaaggatgaatgtgatatggaacatccacagttcataatcccagatgaaggtagtaaattaagaattaagagagacgatgagataaataccaggaaaatggatgaagaaaaggaaaggcgtttaaacgcaattataaacggtgaagtttga

SEQ ID NO: 11629 - DNA, 1290 bp, Saccharomyces cerevisiae
atggtagacgtggaagagaaaagtcaagaagttgaatatgttgatccaacggtgaatagggtgcccaattatgaggtatctgaaaaggcgtttcttttgacacaatcaaaggttagtattgaacagcgtaaggaagcggcagagttcgttttagccaaaattaaagaggaagaaatggccccttattataaatatctttgcgaggaataccttgttaataatggccaatctgacttggaacacgatgaaaagtcagattctttaaacgaatggatcaaatttgaccaggagctatacaatgaattgtgcaaaaaaaatgaaagtaagattaaagagttaaatgaaaagatccaaaaattggaagaagatgatgaaggtgaactagaacaagctcaagcctggattaatctgggtgaatattatgcacaaatcggtgacaaagataatgctgaaaagacgctagggaaatcattatcgaaggctatttccacaggcgccaaaattgatgttatgctaacaattgcaaggctggggttcttttataacgaccaactttatgttaaggagaagttggaagcagtcaattctatgattgaaaaaggtggtgactgggagagaagaaatagatataaaacatactatggtatccactgcttggccgtaagaaactttaaggaagcggcaaagttattggtcgattctctagcaactttcacctctattgaattaacttcctatgaaagcattgccacatatgcatcggtcacaggtttattcactctggaaagaacagacctaaaatccaaagtcatcgattcacctgaattgttatctttaatctcaacaactgccgcactacaatctatctcgtcgttaacaatttccctttacgcgtccgattatgccagttactttccatatcttttggaaacatatgcaaatgttttgattccatgtaaatatttgaatagacatgcagatttctttgttagagaaatgagaagaaaagtctacgcacaattgttggaatcatataagactttgtcgctgaaatctatggcaagcgcatttggtgtttcggttgcgttcttggataacgacctgggtaagtttattccaaataagcaactaaattgtgtcattgatagagttaatgggatcgtagagaccaacaggccagacaacaaaaatgctcaataccatctgctagttaagcaaggtgacggtttgctaacaaaattacaaaaatacggtgcagcagtgagattgacagggtcagatcgtgtttga

SEQ ID NO: 11630 - DNA, 1290 bp, Artificial Sequence
  Description of Artificial Sequence: Synthetic polynucleotide
atggtagacgtggaagagaaaagtcaagaagttgaatatgttgatccaacggtgaatagggtgcccaattatgaggtatctgaaaaggcgtttcttttgacacaatccaaggttagtattgaacagcgtaaggaagcggcagagttcgttttagccaaaattaaagaggaagaaatggccccttattataaatatctttgcgaggaataccttgttaataatggccaatctgacttggaacacgatgaaaagagtgattctttaaacgaatggatcaaatttgaccaggagttatacaatgaattgtgcaaaaaaaatgaaagtaagattaaagagttaaatgaaaagatccaaaaattggaagaagatgatgaaggtgaattggaacaagctcaagcctggattaatttgggtgaatattatgcacaaatcggtgacaaagataatgctgaaaagacgttggggaaatctttatccaaggctatttccacaggcgccaaaattgatgttatgttaacaattgcaaggttggggttcttttataacgaccaactttatgttaaggagaagttggaagcagtcaattctatgattgaaaaaggtggtgactgggagagaagaaatagatataaaacatactatggtatccactgcttggccgtaagaaactttaaggaagcggcaaagttattggtcgattctttggcaactttcacctctattgaattaacttcctatgaaagcattgccacatatgcatctgtcacaggtttattcactttggaaagaacagacttgaaatccaaagtcatcgattctcctgaattgttatctttaatcagtacaactgccgcattacaatctatctcttctttaacaatttccctttacgcgtccgattatgccagttactttccatatcttttggaaacatatgcaaatgttttgattccatgtaaatatttgaatagacatgcagatttctttgttagagaaatgagaagaaaagtctacgcacaattgttggaaagttataagactttgtctttgaaatctatggcaagcgcatttggtgtttctgttgcgttcttggataacgacttgggtaagtttattccaaataagcaattgaattgtgtcattgatagagttaatgggatcgtagagaccaacaggccagacaacaaaaatgctcaataccatttattggttaagcaaggtgacggtttgttgacaaaattacaaaaatacggtgcagcagtgagattgacagggtctgatcgtgtttga

SEQ ID NO: 11631 - DNA, 213 bp, Saccharomyces cerevisiae
atgaaatcactccatgatagtttaagtgttacagacattaagagaagtcggctgcaaatttccatgcagacactttgtcccttcttggaggataccctacagtgtaaaagcctccttagcttagtggtagagcgttgcacttgtaatgcaaaggtcgttagttcaattctgacaggtggcaaaattttttccctaaagttaacacttatttag

SEQ ID NO: 11632 - DNA, 213 bp, Artificial Sequence
  Description of Artificial Sequence: Synthetic polynucleotide
atgaaatctctccatgatagtttaagtgttacagacattaagagaagtaggttacaaatttccatgcagacactttgtcccttcttggaggataccttgcagtgtaaaagcctccttagcttagtggtagagcgttgcacttgtaatgcaaaggtcgttagttctattttaacaggtggcaaaattttttccttgaagttaacacttatttga

SEQ ID NO: 11633 - DNA, 885 bp, Saccharomyces cerevisiae
atggataattttgaaagtactgctgaaggaaatttaagtataggaaacaaacgagtatacgaactacgaaaaagaaacttccaaagaaatttggtgaataatttgagctttctcgggtatgttttaatatcattggaatatatcaagtatgatcgtaccgtctggacacttataacaagagcaatagtgcaatctctcataagttctccttttccaagtgatgccaagttacgtaggctagcgaccctcggtgcagataataacacgacgggggttgcaacacttccaggcggaagatctatcaggtttcccggaatgtttggaacagaaatgctttataattcttctagtgaagctgagcaacaagaccatgatgataccgctattgtgtccatgaaaaagcaaatccggaagtttttatttcatggttgcttatcgttgaatatgcttttcattatcttaacaatcctattcccaattgatttttttgaacccctgagtggtagcgagccagtagacgatggccctaagaatactccctcacccttttccaattcagatggtctacttttgggtgagagaagaggtgggctttttctacagatgatcggagaacggctaccaaagagcaacttttccggcaatcttggattagtaatgttcgaatttagcatacttattgtacagtttactttattttcactaacatgtgttgtattggcagatttagattttgaagagccagaaagactagaacctgtaaatagtgatggctacgatggctctgtaatagttgcacgaataccattaaataaaaccatgaatgccattttaaatgacggcaatattaatgacaacaatgagaatgctagcaattctgtctaa

SEQ ID NO: 11634 - DNA, 885 bp, Artificial Sequence
  Description of Artificial Sequence: Synthetic polynucleotide
atggataattttgaaagtactgctgaaggaaatttaagtataggaaacaaaagagtatacgaattaagaaaaagaaacttccaaagaaatttggtgaataatttgagctttctcgggtatgttttaatatctttggaatatatcaagtatgatcgtaccgtctggacacttataacaagagcaatagtgcaatctctcataagttctccttttccaagtgatgccaagttacgtaggttagcgaccctcggtgcagataataacacgacgggggttgcaacacttccaggcggaagatctatcaggtttcccggaatgtttggaacagaaatgctttataattcttctagtgaagctgagcaacaagaccatgatgataccgctattgtgtccatgaaaaagcaaatcagaaagtttttatttcatggttgcttatctttgaatatgcttttcattatcttaacaatcttattcccaattgatttttttgaacccttgagtggtagcgagccagtagacgatggccctaagaatactccctctcccttttccaattctgatggtttacttttgggtgagagaagaggtgggctttttttgcagatgatcggagaaagattaccaaagagcaacttttccggcaatcttggattagtaatgttcgaatttagcatacttattgtacagtttactttattttctttaacatgtgttgtattggcagatttagattttgaagagccagaaagattagaacctgtaaatagtgatggctacgatggctctgtaatagttgcaagaataccattaaataaaaccatgaatgccattttaaatgacggcaatattaatgacaacaatgagaatgctagcaattctgtctga

SEQ ID NO: 11635 - DNA, 1008 bp, Saccharomyces cerevisiae
atgtcaaatattgtgggtattgaatataaccgtgtaacgaatacaacctccacggattttcctggtttctcgaaggatgcagaaaacgagtggaatgtggaaaaattcaaaaaggacttcgaagtcaatatttcgtcattagacgcaagagaggcaaatttcgacttgataaacattgacacatcgattgcgaatgcctttcgtcgtataatgatttccgaggttccatccgtggctgctgaatacgtctatttttttaacaatacatccgttatccaagatgaggttttggctcatagaataggcttggttccattaaaagttgaccctgatatgctcacatgggttgatagtaatttgccggacgatgaaaagtttacggatgaaaatactatcgttttgagtttgaacgtgaagtgcacaagaaatccagatgctccaaagggatctactgatccaaaggaactatataacaatgcccatgtctacgcccgtgatttgaagtttgaaccacagggcagacaatctaccacttttgctgattgtccggttgttccagctgatcctgatattttattagctaagctaaggcctggtcaagaaatttcgttgaaggcacattgcattttaggtatcggtggtgatcatgctaaattttcaccagtttccaccgcttcttatagattattacctcaaatcaatatcttacagccaatcaaaggtgaaagtgccagaagatttcaaaaatgttttcccccaggtgttattggtattgatgaaggttcagatgaagcgtatgtcaaagatgctaggaaggatacggtttccagggaggttttaagatacgaagagtttgctgataaagttaaattaggaagagtgaggaaccactttattttcaacgtagaaagcgctggtgccatgacaccagaagaaatttttttcaaatccgtcaggattttaaagaataaggctgagtatttgaaaaactgtccaattacccaatga

SEQ ID NO: 11636 - DNA, 1008 bp, Artificial Sequence
  Description of Artificial Sequence: Synthetic polynucleotide
atgagtaatattgtgggtattgaatataaccgtgtaacgaatacaacctccacggattttcctggtttctccaaggatgcagaaaacgagtggaatgtggaaaaattcaaaaaggacttcgaagtcaatatttcttctttagacgcaagagaggcaaatttcgacttgataaacattgacacatccattgcgaatgcctttcgtcgtataatgatttccgaggttccatccgtggctgctgaatacgtctatttttttaacaatacatccgttatccaagatgaggttttggctcatagaataggcttggttccattaaaagttgaccctgatatgctcacatgggttgatagtaatttgccggacgatgaaaagtttacggatgaaaatactatcgttttgagtttgaacgtgaagtgcacaagaaatccagatgctccaaagggatctactgatccaaaggaattgtataacaatgcccatgtctacgcccgtgatttgaagtttgaaccacagggcagacaatctaccacttttgctgattgtccggttgttccagctgatcctgatattttattagctaagttaaggcctggtcaagaaatttctttgaaggcacattgcattttaggtatcggtggtgatcatgctaaattttctccagtttccaccgcttcttatagattattacctcaaatcaatatcttacagccaatcaaaggtgaaagtgccagaagatttcaaaaatgttttcccccaggtgttattggtattgatgaaggttctgatgaagcgtatgtcaaagatgctaggaaggatacggtttccagggaggttttaagatacgaagagtttgctgataaagttaaattaggaagagtgaggaaccactttattttcaacgtagaaagcgctggtgccatgacaccagaagaaatttttttcaaatccgtcaggattttaaagaataaggctgagtatttgaaaaactgtccaattacccaatga

SEQ ID NO: 11637 - DNA, 1695 bp, Saccharomyces cerevisiae
atgttttcacgaagtgatcgagaggtagatgatttggctggtaatatgagtcatttagggttctatgatttgaatattcctaaacctacttctccacaggcgcaatataggcctgctagaaagagcgaaaatggaagattaactcccggacttccaagatcatataagccgtgtgattcagatgatcaagataccttcaaaaatcgcatttcattgaatcactcaccgaagaagctacccaaggattttcacgagcgtgcttcccaaagtaaaacccagagagttgttaatgtatgccaactttactttctcgactattactgtgacatgtttgattatgttattagcagaagacaacgtacgaagcaggtgctaagatatcttgaacagcaaagaagtgtcaaaaacgtttctaataaggttttaaatgaagaatgggctttgtatttgcaaagagaacacgaagtactgagaaaaaggaggttgaaacctaagcacaaggattttcagatactgacacaagttggacagggtggttatgggcaagtttatcttgcaaaaaaaaaagacagtgatgaaatttgtgctttgaaaatattaaacaagaaacttttattcaaactaaacgagacgaatcacgtccttactgagagggacatactaaccacaactagatctgactggcttgtgaagttgctttatgcatttcaggatccagagagcctatatttagcaatggaatttgtacctggtggtgattttcgcacattgttaataaatacaaggatattgaagagcggtcacgcaaggttctatatcagcgaaatgttttgtgccgtgaacgcgttgcatgaacttggttacactcaccgggatttaaagccggagaatttcttgattgatgctacagggcatatcaagctgaccgattttggtctagcagcagggaccgtatcaaatgaaagaatcgaaagcatgaaaatacgcttagaagaagtaaagaatttggaatttcctgctttcacagaaaggtctatcgaggatagaaggaaaatatatcataacatgaggaagacagaaattaattacgctaactctatggtcggttcgcctgattatatggccctagaagttctggaaggtaaaaaatacgattttacagtggattattggtcattaggctgtatgctttttgaaagtttggttggatatacaccttttagtggttcttctactaatgaaacttacgagaatttaagatattggaaaaaaactttaagaaggccccgtactgaggatagaagagcagcattctcagatagaacctgggatttaattacaagactaatagctgaccccatcaacagagtacgatcttttgagcaagttcgcaaaatgtcttatttcgcagagatcaattttgaaaccctaagaacaagttctccaccatttattcctcaattagatgatgaaacggatgcaggttatttcgatgacttcacaaatgaagaagatatggctaaatatgcagatgtcttcaaaagacagaacaaattatctgcaatggtcgatgactctgccgttgattccaagcttgttggatttacttttaggcatagagatggaaaacaaggttcaagcgggatactttacaatggttcagaacattcagaccctttttcaactttttattaa

SEQ ID NO: 11638 - DNA, 1695 bp, Artificial Sequence
  Description of Artificial Sequence: Synthetic polynucleotide
atgttttctagaagtgatagagaggtagatgatttggctggtaatatgagtcatttagggttctatgatttgaatattcctaaacctacttctccacaggcgcaatataggcctgctagaaagagcgaaaatggaagattaactcccggacttccaagatcttataagccgtgtgattctgatgatcaagataccttcaaaaatcgcatttctttgaatcactctccgaagaagttgcccaaggattttcacgagcgtgcttcccaaagtaaaacccagagagttgttaatgtatgccaactttactttctcgactattactgtgacatgtttgattatgttattagcagaagacaacgtacgaagcaggtgttgagatatcttgaacagcaaagaagtgtcaaaaacgtttctaataaggttttaaatgaagaatgggctttgtatttgcaaagagaacacgaagtattaagaaaaaggaggttgaaacctaagcacaaggattttcagatattaacacaagttggacagggtggttatgggcaagtttatcttgcaaaaaaaaaagacagtgatgaaatttgtgctttgaaaatattaaacaagaaacttttattcaaattgaacgagacgaatcacgtccttactgagagggacatattgaccacaactagatctgactggcttgtgaagttgctttatgcatttcaggatccagagagcttgtatttagcaatggaatttgtacctggtggtgattttcgcacattgttaataaatacaaggatattgaagagcggtcacgcaaggttctatatcagcgaaatgttttgtgccgtgaacgcgttgcatgaacttggttacactcacagagatttaaagccggagaatttcttgattgatgctacagggcatatcaagttgaccgattttggtttggcagcagggaccgtatctaatgaaagaatcgaaagcatgaaaatacgcttagaagaagtaaagaatttggaatttcctgctttcacagaaaggtctatcgaggatagaaggaaaatatatcataacatgaggaagacagaaattaattacgctaactctatggtcggttctcctgattatatggccttggaagttttggaaggtaaaaaatacgattttacagtggattattggtctttaggctgtatgctttttgaaagtttggttggatatacaccttttagtggttcttctactaatgaaacttacgagaatttaagatattggaaaaaaactttaagaaggccccgtactgaggatagaagagcagcattcagtgatagaacctgggatttaattacaagattaatagctgaccccatcaacagagtaagatcttttgagcaagttcgcaaaatgtcttatttcgcagagatcaattttgaaaccttgagaacaagttctccaccatttattcctcaattagatgatgaaacggatgcaggttatttcgatgacttcacaaatgaagaagatatggctaaatatgcagatgtcttcaaaagacagaacaaattatctgcaatggtcgatgactctgccgttgattccaagcttgttggatttacttttaggcatagagatggaaaacaaggttccagcgggatactttacaatggttctgaacattctgaccctttttccactttttattga

SEQ ID NO: 11639 - DNA, 2664 bp, Saccharomyces cerevisiae
atgtcccgtatcattgtcaagggtttgcccgtctatctaacagatgataatctcagggagcattttacaaaaagattacgtcaaaaacattcccatcaagcagttaatggtagtggtccagacctcataacagatgttaaaattcttagagataggaacggagaaagtagaagatttggatttatcggataccgtaacgaggaagacgcttttgatgctgtagagtatttcaatggcagttttatcaacacttctaagatagaagtgtccatggctaaaagctttgcagacccaagagtcccgcagcccatgaaggagaagagaagagaagctctgaaaaggtttagggaaaaggaagaaaaattgctacaagaagaaaatcgaaagaaaaagaaagtggatgaaaataagcacagcaacattgatgacgagattcgcaagaacaagcaattacaagagttcatggagactatgaagccaagctcacaagtcacatcatgggaaaaagttggcattgacaagagcatagaggacgaaaaactaaaacgggaagaagaggactccagcgtgcaagggaattctctattggctcatgcattagccttaaaggaagagaataataaagacgaagcaccaaatttggtcattgagaatgaaagtgacgatgaatattcggctctcaacagaaacagggatgaagatcaagaagatgccggagaggaagaaaagatgataagtattagcaatttgaaggatactgatataggtttagttaatgatgacgctaatagtgatgaaaaagagaatgaaaagaggagaaacctcgcccaagatgaaaaggtttctgacctagattggttcaaacaacgccgtgtaagaatcaaagaaagtgaagcggaaacaagggaaaaatcatcatcatacgctactgaacaaaatgaaagtctcgataccaagaaggaagaacaaccagaacgtgctgtgccgcaaaagacggacgaagaactggctattgaaaaaattaaccaaactggccgtttattcttacgtaatatcttgtatacctccaaagaagaagatttcaggaaactatttagtccatttggagagttagaggaggttcatgtggctttggataccaggactggtcaatccaaaggatttgcatacgttctatttaaggattctaagaatgcagtgaacgcctatgttgaattggataaacagatttttcaaggaagactattgcatattcttcctggtgaagaaaaaaaaagccatagattagatgagtttgatttaaagaatatgccattgaaaaagcaaaaggaattgaaaaggaaggcagctgcatccagacaaacattttcttggaactccttgtatatgaaccaagatgctgttttgggtagtgtggcagccaaattgggtctagaaaaatctcaattgatcgatgctgaaaactcaagttcggctgtcaaacaagctttggctgaagcccatgttattggtgatgttagaaaatactttgaatccaaaggtgttgatctgaccaagttttcacagttaaaatctacaaatcaaagagacgataaagtgatactggttaaaaattttccttttgggacaactagagaagagcttggcgaaatgtttttgccatatggtaaattggaaagattgctcatgccaccagctggtacaatagctatagtgcaattcagggacacaacgtcagcaagggcagctttcactaaactatcgtataaaagatttaaggacggcataatatatctagaaagggggcctaaggattgctttactaaaccagctgaggccgatgatttgataaataacacttctgcaaaagaagaagaaaacccggtagaggtaaaaccttcatcaaatgacttaatggaagcaaacaaggatgtaactgaagggtcatctaatgctcatgatgaagacgttattgatggtccaactgtctcaattttcataaagaatctaaacttctccacgacgaaccaaaatcttactgataggttcaaggttttcactggttttgttgttgcccaagtgaagacaaaacctgatccaaaacatcaaggcaagaccttgtcaatggggtttggttttgtagaattcaggaccaaggaacaagctaatgccgtgatagctgcaatggatgggacggtaatcgacggccataagattcaattgaagttatcccatagacaagcatctcagagcggtaatacaaagactaaatccaataagaaaagcggtaaaatcattgttaagaatcttccatttgaagctactaggaaagacgttttcgaattattcaattcttttggtcaattaaaatctgttagagttccaaagaagttcgacaagtctgcaagaggttttgcgttcgtggaatttttacttccaaaggaagcagaaaatgctatggatcagttgcacggtgtccatttactgggccgcagattggtaatgcaatatgcagaagaagatgcagttgacgctgaagaagagatagccaggatgacaaagaaggttagaaagcaagttgccactaatgagatggctgccttaagaaatgggggcggtagaaagaaactggatgtggatgatgaagaaaacgaaggtttctag

SEQ ID NO: 11640 - DNA, 2664 bp, Artificial Sequence
  Description of Artificial Sequence: Synthetic polynucleotide
atgtcccgtatcattgtcaagggtttgcccgtctatttgacagatgataatctcagggagcattttacaaaaagattacgtcaaaaacattcccatcaagcagttaatggtagtggtccagacctcataacagatgttaaaattcttagagataggaacggagaaagtagaagatttggatttatcggataccgtaacgaggaagacgcttttgatgctgtagagtatttcaatggcagttttatcaacacttctaagatagaagtgtccatggctaaaagctttgcagacccaagagtcccgcagcccatgaaggagaagagaagagaagctttgaaaaggtttagggaaaaggaagaaaaattgttgcaagaagaaaatagaaagaaaaagaaagtggatgaaaataagcacagcaacattgatgacgagattcgcaagaacaagcaattacaagagttcatggagactatgaagccaagctctcaagtcacatcttgggaaaaagttggcattgacaagagcatagaggacgaaaaattgaaaagagaagaagaggactccagcgtgcaagggaattctttgttggctcatgcattagccttaaaggaagagaataataaagacgaagcaccaaatttggtcattgagaatgaaagtgacgatgaatattctgctctcaacagaaacagggatgaagatcaagaagatgccggagaggaagaaaagatgataagtattagcaatttgaaggatactgatataggtttagttaatgatgacgctaatagtgatgaaaaagagaatgaaaagaggagaaacctcgcccaagatgaaaaggtttctgacttggattggttcaaacaacgccgtgtaagaatcaaagaaagtgaagcggaaacaagggaaaaatcttcttcctacgctactgaacaaaatgaaagtctcgataccaagaaggaagaacaaccagaacgtgctgtgccgcaaaagacggacgaagaattggctattgaaaaaattaaccaaactggccgtttattcttacgtaatatcttgtatacctccaaagaagaagatttcaggaaattatttagtccatttggagagttagaggaggttcatgtggctttggataccaggactggtcaatccaaaggatttgcatacgttttatttaaggattctaagaatgcagtgaacgcctatgttgaattggataaacagatttttcaaggaagattattgcatattcttcctggtgaagaaaaaaaaagccatagattagatgagtttgatttaaagaatatgccattgaaaaagcaaaaggaattgaaaaggaaggcagctgcatccagacaaacattttcttggaactccttgtatatgaaccaagatgctgttttgggtagtgtggcagccaaattgggtttggaaaaatctcaattgatcgatgctgaaaacagtagttctgctgtcaaacaagctttggctgaagcccatgttattggtgatgttagaaaatactttgaatccaaaggtgttgatttgaccaagttttcccagttaaaatctacaaatcaaagagacgataaagtgatattagttaaaaattttccttttgggacaactagagaagagcttggcgaaatgtttttgccatatggtaaattggaaagattgctcatgccaccagctggtacaatagctatagtgcaattcagggacacaacgtctgcaagggcagctttcactaaattatcttataaaagatttaaggacggcataatatatttggaaagggggcctaaggattgctttactaaaccagctgaggccgatgatttgataaataacacttctgcaaaagaagaagaaaacccggtagaggtaaaaccttcttccaatgacttaatggaagcaaacaaggatgtaactgaagggagttctaatgctcatgatgaagacgttattgatggtccaactgtctctattttcataaagaatttgaacttctccacgacgaaccaaaatcttactgataggttcaaggttttcactggttttgttgttgcccaagtgaagacaaaacctgatccaaaacatcaaggcaagaccttgtccatggggtttggttttgtagaattcaggaccaaggaacaagctaatgccgtgatagctgcaatggatgggacggtaatcgacggccataagattcaattgaagttatcccatagacaagcatctcagagcggtaatacaaagactaaatccaataagaaaagcggtaaaatcattgttaagaatcttccatttgaagctactaggaaagacgttttcgaattattcaattcttttggtcaattaaaatctgttagagttccaaagaagttcgacaagtctgcaagaggttttgcgttcgtggaatttttacttccaaaggaagcagaaaatgctatggatcagttgcacggtgtccatttattaggccgcagattggtaatgcaatatgcagaagaagatgcagttgacgctgaagaagagatagccaggatgacaaagaaggttagaaagcaagttgccactaatgagatggctgccttaagaaatgggggcggtagaaagaaattggatgtggatgatgaagaaaacgaaggtttctga

SEQ ID NO: 11641 - DNA, 663 bp, Saccharomyces cerevisiae
atgagttcgaattcaacaccagaaaaggttactgcagaacacgttctgtggtatattcccaataagatcggttatgttcgtgttatcaccgccgccctttcttttttcgttatgaagaatcatcctacggcctttacatggttgtatagtacatcatgtctactggatgcgctagacggaaccatggcaagaaagtacaatcaggtttccagtctgggtgccgttctggacatggttaccgacagatccagtaccgctggcttgatgtgtttcctttgtgtgcagtatccccaatggtgcgttttcttccaattaatgctgggcttggatattactagtcactacatgcatatgtatgccagtttaagtgctggtaagacttctcataaaagtgtgggcgagggtgagtccagattgttacacctgtactacacgagaagagacgtactgttcactatctgtgcgtttaacgaactattttatgctggattgtacttgcagttgttctcaaattctgcaacctttggtaaatggactacaatcataagtttccctggttacgtgttcaagcagaccgcaaacgttgtccagctaaaaagggcagccttgattttagcagacaacgatgccaagaatgccaacgagaagaacaagacttactga

SEQ ID NO: 11642 - DNA, 663 bp, Artificial Sequence
  Description of Artificial Sequence: Synthetic polynucleotide
atgagtagtaattctacaccagaaaaggttactgcagaacacgttttatggtatattcccaataagatcggttatgttcgtgttatcaccgccgccctttcttttttcgttatgaagaatcatcctacggcctttacatggttgtatagtacatcttgtcttttagatgcgttggacggaaccatggcaagaaagtacaatcaggtttccagtttgggtgccgttttggacatggttaccgacagatccagtaccgctggcttgatgtgtttcctttgtgtgcagtatccccaatggtgcgttttcttccaattaatgcttggcttggatattactagtcactacatgcatatgtatgccagtttaagtgctggtaagacttctcataaaagtgtgggcgagggtgagtccagattgttacacttgtactacacgagaagagacgtattattcactatctgtgcgtttaacgaattattttatgctggattgtacttgcagttgttcagtaattctgcaacctttggtaaatggactacaatcataagtttccctggttacgtgttcaagcagaccgcaaacgttgtccagttgaaaagggcagccttgattttagcagacaacgatgccaagaatgccaacgagaagaacaagacttactga

SEQ ID NO: 11643 - DNA, 948 bp, Saccharomyces cerevisiae
atggatgttttattgtcgcttcctcaaccggaattatttaagaccacggtgattccgttcttggcaaatcgcaatataatcaagtcggaagcgattctctccaacttgcactcaattttttatgttgctatattctaccatatttggtttctttttggcaaatggatcttattcccacatttggttaaatggaaattggactatgaccaaaaacataacgtcaagaaagatgagaagacaacttcggaacgtcaagctcaacattacaaaaagaagtacacttctttgatcaatcaaagttcagtccacttaatatccctactgcaaagcatagtggtcctgtactactcattgaagttcttgcttgatccaaaagcctcggccgagccctaccaaacctcacactctcgagtgtttacagaaaatcgagacactcaagtcatctgtatttttgctattggttatttcgtctgggatatctatatttccaccatgtattctactttccccttcgttgtgcacggaataatctccaccgtcgtgttttgcatcggattgaaaccgtacatccaatattacgccccagtgttcttgatgttcgaactttccaatccctccttgaactttagatggttcggtatcaaatttctaccccagaaaagcaaattctgctctctactgctgctgttgaacaatttgacgctcatggtcgtcttctttgccgctagaatcgcctgggggtggtttcaaattggaaaactatgttacgacttttaccaggtgcgcaatgaacctggtttcttagtctttgacaccattgttatccttgcaggcaatttcgtcctggacatcttgaatgttatttggttttctaccatggtgtctgtggctgcaaaggtcttgaagaagggggagtctgtagacaaagtcactaagaatgaacaataa

SEQ ID NO: 11644 - DNA, 948 bp, Artificial Sequence
  Description of Artificial Sequence: Synthetic polynucleotide
atggatgttttattgtctcttcctcaaccggaattatttaagaccacggtgattccgttcttggcaaatcgcaatataatcaagtctgaagcgattctctccaacttgcactctattttttatgttgctatattctaccatatttggtttctttttggcaaatggatcttattcccacatttggttaaatggaaattggactatgaccaaaaacataacgtcaagaaagatgagaagacaacttctgaacgtcaagctcaacattacaaaaagaagtacacttctttgatcaatcaaagttctgtccacttaatatccttattacaaagcatagtggtcttgtactactctttgaagttcttgcttgatccaaaagcctctgccgagccctaccaaacctctcactctcgtgtgtttacagaaaatagagacactcaagtcatctgtatttttgctattggttatttcgtctgggatatctatatttccaccatgtattctactttccccttcgttgtgcacggaataatctccaccgtcgtgttttgcatcggattgaaaccgtacatccaatattacgccccagtgttcttgatgttcgaactttccaatccctccttgaactttagatggttcggtatcaaatttttgccccagaaaagcaaattctgctctttattattattattgaacaatttgacgctcatggtcgtcttctttgccgctagaatcgcctgggggtggtttcaaattggaaaattatgttacgacttttaccaggtgcgcaatgaacctggtttcttagtctttgacaccattgttatccttgcaggcaatttcgtcttggacatcttgaatgttatttggttttctaccatggtgtctgtggctgcaaaggtcttgaagaagggggagtctgtagacaaagtcactaagaatgaacaatga

SEQ ID NO: 11645 - DNA, 3252 bp, Saccharomyces cerevisiae
atgtctgactatttcacgtttcctaagcaggagaatggcggtatctcgaagcagcctgcgacaccaggttcaactcggagctcttctagaaatttggagttaccgaagaactatcgttcatttggtggtagtagcgatgaactggcatctatgtattccgccgactcccagtacttgatggatatgattcctgattcattgacgctgaaaaatgagccagcatctggaaatacgcaaatgaacgggccagatggcaaagagaataaggacataaaacttgacgagtatatattacccaagacagacccaaggtcaccctactatattaacatgcctatacctaaaaaattgccgaagagtgaaggtaaggcgagggctaaacaaaaggttaacagggctgatccttctgatttagatgtggagaacatttacgaaacttccggggagtttgttagagagtatccgacagatattttgattgataggtttcacaaatggaagaaaatcttgaaaagtttgatcgcttacttcagagaagctgcctactctcaggaacaaattgcaaggatcaactaccagatgaaaaatgccgtaaaatttgcttttcttactgatttggaagatgaaacaaacaaactggttgatccaagtatatctaagttgcctactaagaaacctcagcctgtcccattggccgctcaaaaattggacagcaagtacgacacagatgtggaacagccgcagtcaatccaatcagtaccttcggaagaggtagcttcagcttcttctggcttcatgaaatttgggtcaggatccattcaagatattcaagtgattttgaagaagtaccatttatctttgggtagtcaacaatataagatctctaaggaaatcttggcatatattatacccaaattgaccgacttgcgtaaggatttgaccacaaagatgaaagaaattaaagaattaaatggagatttcaagactaacataggcgagcatatcaaaataacaagcaggcttctgaataaatatattgcttcagtgaagttattagatgaagcatccacttcgggcgataagcaaggtgaaaaattaaaaccaaaacacgatccataccttttgaaattacaactagatttgcagctgaaaagacaattactcgaagaaaactatcttcgagaagcttttctgaatttacaatcagcagcactacaactggagaaaatagtatattctaaaattcaatccgcattacagcgctactcagcgttaattgattcagaagcacgattaatgatcaaaaatttgtgccatgaattgcagcaaggtattctatctagaccaccggctgtagagtgggataattttgtctctcatcatcctacctgtctgatgaatttaaaatcgacagacccgccaccgcaacccagaagattatctgatattgtttatcctaacatgaaatcgccgctggccaaatgcattagagtaggatatctactgaagaaaacagagtcttctaaaagttttactaaaggttattttgtgttgactacaaattatcttcacgaattcaaaagcagcgatttctttctagacagcaagtctccccgttcaaaaaataaacctgttgttgaacaatcagacattagccgtgtgaataaggatgggactaacgctggcagtcacccatcgagcaaagggacacaggatccgaaactgacgaagagaagaaagggtttgagttcttcgaatctatatcctatctctagtttgtctttaaatgattgctcattaaaggatagtactgactcaacttttgttttacaagggtatgctagttatcattcaccagaggacacatgtacaaaagaatcaagcacgacctcagatttggcatgtccaacaaagacgcttgcttcaaataagggcaaacatcaacgtacgccttcagctctctcgatggtgtccgttccgaaatttctaaagagttcttccgtgcccaaggaacaaaaaaaggctaaagaagaagctaacatcaataagaagtcaatttgcgagaagcgcgttgaatggacgtttaaaatattttccgcaagtcttgaaccaactccagaggaatcaaaaaatttcaagaaatgggttcaggacataaaagcgcttacaagtttcaattctactcaggagaggtcgaacttcattgaagaaaagattctgaaaagtagaaaccataataatggaaagagctctcaaaggtccaaaaacagtacatatatcactccagtagacagttttgttaacctttctgaaaaagtaacgccatcttcctctgttaccacgttaaacactaggaagagggcaaatcgtcctcgttatatagacatcccaaaaagcgcaaatatgaatgcaggcgctatgaattccgtatacaggtcaaaagtcaatacaccagccattgatgaaaatggtaatctggccatagtgggagaaacgaaaaacagtgctccacaaaatggtatgagttacacaattagaaccccttgcaaatcgccttattcaccttatactggggaaggtatgctttacaaccggtcagcagataacttaatggcatcctcttcgcgaaaagcatcggctcccggagaggtacctcaaatagctgttagtaatcatggggatgaagccattattccggcaagcgcgtattcagatagtagtcataaatcgtctcgtgcctccagtgttgcatccattcacaaccaacgggttgatttttatccttcgccattaatgaacttaccaggtgtttcacccagttgtctagcattggatggtaatgcaaacggatattttggaataccattgaattgcaattcggaagcaagacgagggtcagatctttcaccttttgagatggagtctccattgttcgaggaaaacagaactcaaaactgcagtggctctcgcaaaagttcagcttgtcatattccccatcaatgtggtccaaggaaagaaggtaatgactcacgattgatctacggcaatgagaagggcgcctcacaatcacgtctaacgttgaaggaaccgcttacatctaaaggtgttgaagctccttatagcagtttgaaaaagacatatagtgcggaaaacgtcccactaacatctactgtatcgaatgataagtctcttcactcgcgcaaggagggaagtactaatactgtacctgctacatccgcgtcaagtaagtga

SEQ ID NO: 11646 - DNA, 3252 bp, Artificial Sequence
  Description of Artificial Sequence: Synthetic polynucleotide
atgtctgactatttcacgtttcctaagcaggagaatggcggtatctccaagcagcctgcgacaccaggttctactagaagctcttctagaaatttggagttaccgaagaactatcgttcttttggtggtagtagcgatgaattggcatctatgtattccgccgactcccagtacttgatggatatgattcctgattctttgacgttgaaaaatgagccagcatctggaaatacgcaaatgaacgggccagatggcaaagagaataaggacataaaacttgacgagtatatattacccaagacagacccaaggtctccctactatattaacatgcctatacctaaaaaattgccgaagagtgaaggtaaggcgagggctaaacaaaaggttaacagggctgatccttctgatttagatgtggagaacatttacgaaacttccggggagtttgttagagagtatccgacagatattttgattgataggtttcacaaatggaagaaaatcttgaaaagtttgatcgcttacttcagagaagctgcctactctcaggaacaaattgcaaggatcaactaccagatgaaaaatgccgtaaaatttgcttttcttactgatttggaagatgaaacaaacaaattggttgatccaagtatatctaagttgcctactaagaaacctcagcctgtcccattggccgctcaaaaattggacagcaagtacgacacagatgtggaacagccgcagtctatccaaagtgtaccttctgaagaggtagcttctgcttcttctggcttcatgaaatttgggtctggatccattcaagatattcaagtgattttgaagaagtaccatttatctttgggtagtcaacaatataagatctctaaggaaatcttggcatatattatacccaaattgaccgacttgcgtaaggatttgaccacaaagatgaaagaaattaaagaattaaatggagatttcaagactaacataggcgagcatatcaaaataacaagcaggcttttgaataaatatattgcttctgtgaagttattagatgaagcatccacttctggcgataagcaaggtgaaaaattaaaaccaaaacacgatccataccttttgaaattacaattggatttgcagttgaaaagacaattactcgaagaaaactatcttagagaagcttttttgaatttacaaagtgcagcattacaattggagaaaatagtatattctaaaattcaatccgcattacagcgctactctgcgttaattgattctgaagcaagattaatgatcaaaaatttgtgccatgaattgcagcaaggtattttatctagaccaccggctgtagagtgggataattttgtctctcatcatcctacctgtttgatgaatttaaaatctacagacccgccaccgcaacccagaagattatctgatattgtttatcctaacatgaaatctccgttagccaaatgcattagagtaggatatttattgaagaaaacagagtcttctaaaagttttactaaaggttattttgtgttgactacaaattatcttcacgaattcaaaagcagcgatttctttttggacagcaagtctccccgttctaaaaataaacctgttgttgaacaatctgacattagccgtgtgaataaggatgggactaacgctggcagtcacccatccagcaaagggacacaggatccgaaattaacgaagagaagaaagggtttgagttcttccaatttatatcctatctctagtttgtctttaaatgattgctctttaaaggatagtactgactctacttttgttttacaagggtatgctagttatcattctccagaggacacatgtacaaaagaaagtagcacgacctctgatttggcatgtccaacaaagacgcttgcttctaataagggcaaacatcaacgtacgccttctgctctctctatggtgtccgttccgaaatttttgaagagttcttccgtgcccaaggaacaaaaaaaggctaaagaagaagctaacatcaataagaagtctatttgcgagaagcgcgttgaatggacgtttaaaatattttccgcaagtcttgaaccaactccagaggaaagtaaaaatttcaagaaatgggttcaggacataaaagcgcttacaagtttcaattctactcaggagaggtctaacttcattgaagaaaagattttgaaaagtagaaaccataataatggaaagagctctcaaaggtccaaaaacagtacatatatcactccagtagacagttttgttaacctttctgaaaaagtaacgccatcttcctctgttaccacgttaaacactaggaagagggcaaatcgtcctcgttatatagacatcccaaaaagcgcaaatatgaatgcaggcgctatgaattccgtatacaggtccaaagtcaatacaccagccattgatgaaaatggtaatttggccatagtgggagaaacgaaaaacagtgctccacaaaatggtatgagttacacaattagaaccccttgcaaatctccttattctccttatactggggaaggtatgctttacaacagaagtgcagataacttaatggcatcctcttctagaaaagcatctgctcccggagaggtacctcaaatagctgttagtaatcatggggatgaagccattattccggcaagcgcgtattctgatagtagtcataaatcttctcgtgcctccagtgttgcatccattcacaaccaaagagttgatttttatccttctccattaatgaacttaccaggtgtttctcccagttgtttggcattggatggtaatgcaaacggatattttggaataccattgaattgcaattctgaagcaagaagagggtctgatctttctccttttgagatggagtctccattgttcgaggaaaacagaactcaaaactgcagtggctctcgcaaaagttctgcttgtcatattccccatcaatgtggtccaaggaaagaaggtaatgactctagattgatctacggcaatgagaagggcgcctctcaatcccgtctcacgttgaaggaaccgcttacatctaaaggtgttgaagctccttatagcagtttgaaaaagacatatagtgcggaaaacgtcccattaacatctactgtatctaatgataagtctcttcactctcgcaaggagggaagtactaatactgtacctgctacatccgcgtccagtaagtga

SEQ ID NO: 11647 - DNA, 834 bp, Saccharomyces cerevisiae
atgggtttacctaaatcggcatataagaagttactcatagattgtccaacgagagtcattaataaaaactgtgcccaacgagtcaaagatgtttctccgctcattacaaacttcgagaaatggtcggataagcgcaagaagctctatttcaaagatgaagaggaaatggtggggcagttccatttggaaaatttcaatttaaaaaataacttatatggtaggcttttagcttctccaatgagagcagaaaaaatctcaaaattaaaatcgtgtagagaattactaattccattgaaagtggtaccatcaactggcaaagatcagcatgctgataaagataaactaaaactggtacctacactagattattccaaatcatacaaaagctcgtacgtattgaattcagcctccattgtacaagacaacttggcggctgcgacgtcatggttcccaatctcggtattgcaaacatcaactccaaagagcctagaagttgattcctctacatttataacggaatacaatgctaacttgcacgcatttataaaagcaagactttcagtgataccgaatgttggaccttcttcgataaatcgtgttttactcatttgtgacaagagaaaaacacccccgattgaaatacaagtagttagtcatggtaaagggctaccaattacacagtctgtctttaaccttggttatctccacgagccaactctagaagctatcgtgagtaaagatgcagttactaatggaatttacctggatgccgacaatgacaaggatctcatcaaacacctttatagtacattattgtttcattcagttaactga

SEQ ID NO: 11648 - DNA, 834 bp, Artificial Sequence
  Description of Artificial Sequence: Synthetic polynucleotide
atgggtttacctaaatctgcatataagaagttactcatagattgtccaacgagagtcattaataaaaactgtgcccaaagagtcaaagatgtttctccgctcattacaaacttcgagaaatggtctgataagcgcaagaagctctatttcaaagatgaagaggaaatggtggggcagttccatttggaaaatttcaatttaaaaaataacttatatggtaggcttttagcttctccaatgagagcagaaaaaatctccaaattaaaaagttgtagagaattattgattccattgaaagtggtaccatctactggcaaagatcagcatgctgataaagataaattgaaattagtacctacattagattattccaaatcttacaaaagctcttacgtattgaattctgcctccattgtacaagacaacttggcggctgcgacgagctggttcccaatctctgtattgcaaacatctactccaaagagcttggaagttgattcctctacatttataacggaatacaatgctaacttgcacgcatttataaaagcaagactttctgtgataccgaatgttggaccttcttctataaatcgtgttttactcatttgtgacaagagaaaaacacccccgattgaaatacaagtagttagtcatggtaaagggttaccaattacacagtctgtctttaaccttggttatctccacgagccaactttggaagctatcgtgagtaaagatgcagttactaatggaatttacttggatgccgacaatgacaaggatctcatcaaacacctttatagtacattattgtttcattctgttaactga

SEQ ID NO: 11649 - DNA, 7470 bp, Saccharomyces cerevisiae
atgtctatgttaccgtggtctcaaataagggatgtgtctaaactattattaggctttatgctttttattatatcaattcagaaaatcgctagtattctcatgtcatggatattgatgctgcgccattccacaatacgaaaaatttcatttggatacttttttggtacgtcaataagacgagcgtttatcttaactgattttgctcaaatatatattggcaagataaccttgcgaataggttggaaacccggaattgtgtttcataatgttgatttgaagttatttgggaaggacagccatatcactgcacattcaactaaagactccagaacatatttcaatccgcgggatcaaacttttacctttgtaattaacaggcgagtcctatcaattttgaaacttgtgttctcattttccactttctttcatactttagctcttacagtgcctaatggaaaacaatataaattaaatatcggatccataacgatatcacacccacacgatgataccataaagttagaggcatttttgcatgattttacccatcctgaaacgaaagatactttgaaccatactggtttttttatggtctgtaaaattggaaaggaagatgatacaggcagcaactgcacaaaagttatactaaaaaattggaaatcaagtctcaaaataagtgatgtttgttggcatcttccagagaagaaagggaagaatttgcattcggagcctgttgagcctttttctgctggtgatgatgcggaaatgctcacttcatatcgtaagatgctaaagccttttcactacccactgaaaactttgaacattctggaccttaaggtagaaaatgtaaagttgatttacaaaaaaaagtttacaattcgcatatcaagtgctcaactttacttggaatcaatctccattctaaataatgtctccgctttggaacttttacccttaaataagcccacatggggcgattttgaactatcactttctgcaaatgctgttgtagtagatatcgatggtaatacagcagttagaattccatttggaaatgtcatactgacgtcagatattttactatttttacttgacaatgtacctttacggagaacgaaggtatcttccattttgaacattataaatccttcagtattcctcactatacatcaagtactggaagttcttcatttagtggacaaattcgatagccctgagacctcatcatgtactaacacaaacgacagatcattaaatattttagatttagatattgatcgattgcccagttttaactttgaactactaatgtcgaattttatttcaaggctgcatatatcagatgaggagaatgtgacgtttaaggtcttcagcacacatgctctctttagccgtaacaacttgtctatgactcctaaaaagggacaagtaatgcaaatacgtccggattggccatttgcgaagacagccctagtatctgatcaattatctaactatattaaaattgtgggtacatcactctcttacctgagaattccaacagagcaggacgctaacccagtgtctataccagtctgtggctttgaaagattagacacatttctggatgaattttcaaattctaaattgatcgttcagtctacactaagacattcgtacgttagtcttgagaacattgaagttttgcatactttaagtcgcgcctttgacaaaatttacttgctaatatctagcagaacaaaaaggaatgcggctcataaagcgaatggtggaaaattgggggacctaaatgaagccaagaaaacatttaactggtcattgaaacttagaatgaaggatatttcatgttcgttactggtcgctgggtttcttccgaaaaatttggatcctgtggaagctgagaattttaacttatctgacgtaactagaggcgccaaagttgtttttacagaatcaatattgttagcggacagccaggagaaaaacttcactattattgatgcatccgtatatcgtttcatggatggcactacgtataagccctctcctgaggttattattcaatttaccaatttgttattgagttttaacgactcagatgaaattcatttttcacttcccaagattaaatttaagatggatgtaaatattatctggttgtggttttatattcggagtatatggataaaatttcgtcctaattcaaaattgagccgaaattcagtgagcagtgtaaaatctgtcaatgttctcgatagattaagagtagatataggaaagatgattatagagctaacgcttcctcataatacagaggtactcctaatattcgagaggattggactttcaagttccactaaaaatcttacaattgcatctttgtcagcgtacgtggtatcggtttatgtgaagcatattaaggtttatgtttccttgctaaatattaatgactttgagctagacactgaagagttgatctgcaagaaatccgctgttataaacacctcattgattcattttcatgccgaatatcattttagattttacatgataacggataacatagtcacgttgtataaatcgtttaagcaaattaaattggcattttccaatttgaatgaatttaagcgattataccctcagcaacagtttccgaaaaaagttccaaatttacatatttgttgccaggattttctaattgatattgaagaagatccttttgagcaggagttaggattaattttgaaagttggtgttttggaacaacgtgagaggttaaagaagcttgaagagttcaaggaaaagctatcaacatatgaggacatgaatgtacgtttaaggtcgctctatgatacctcccgtggacaaagttttttcccagagttttatgcgaatgatcaagaatatgagcaaaaggcctatctcaggttgttagaaaacttttcaacgtcatggattgccagatacaggaaagcaaaactttctttttatggtatgccttatcgggttatcagccgtgaagagcttggtacgaaataccacttgtttactagacagaaaaccagtactgttgctaacctcgtcgtaaaagatttggattttaaactaggcagtccttccttccctttagacaattatatggattttgtttaccagtatggaaaaaaagttccaaaatctacggagtacactttgctaattattcttggcctcaaaatcaaaagcgcgttatgggagttgcgtctgagagattatccaatacctgctatatcatttcccgacacatttacaacaggtgatgttgtatttgctgaaaagatgccagcaccttgcgcgcttcatactgtttatgttccttttgtcagctctgcccaaagaagcccctataatgacgccaatacaatatatggtttgcacatcattcgtacaattaattcagtcaaaacatatttcaatattaggtcaatggttacatcttcttcatctgccagaataacatgggggaaatctctgcaacccggttatgagtctttgatgctttggtttgattttttaaccaaacctctcatcgatccgtccaaaaagctaggattttgggacaaattcagatatttagtgcatgggaagtggatatacgagttttcagaggaaagtgagatccacttaaatattaaaggttcacatgatccttataagattacagatgatggtgcgggtctggcgttctgctggtctggtggcaccacaatttacgttcataactccacggatcctaaagagtttttaaaaattgaatcccaaaggtttcagttggcagtgccagactttgccaaagttagtaaatttgataaagtctttatgaagctcgatggaagagtaatttggacattaggtttactttttgaacaaggcgatatatctaaggctggtgacgaagagaggttccttccaaataggccacattatgaaatacagctgatgaatccagatggagtcgcagatttggatcaccatgatacatacaaaggatttagaacatcttttatccacatgtcatttggtgtctattcttctgagcacggatccataaatagtctctatctcgcaccttacgctttaacacatttctttaagtggtggaatttatttcatacatatacatctggtcctattaggcaaggacggttatttacggatgtacttcaaaacaagacaaagtttggtcgctcattatttacaatagcttatcagctacatttaaaacggctaatggttacgcatatttatcggcatattactactcaatatgatcttgaaaaagaccgcaaaataacttttactggattgaaagggaggtttgattcactgaaaattgatttgcatcaaaaaagagttaaactgacccatacgaaccaaaaattaaataagtcaaaacctgtatggaagtttaagatgtctaggggtgagattgattgtgcagaagcagatattaggatattatcaactctgtttgatcaggaagcagttaaggaaattcttacttctggactcgatggcatacttgaagacgagccatcacgtcctattacgcctcaagatgtggaatacttgcgtgaatcagattggtatgattatgaggattatatagacttgaatcaagtgccgcttggttcctcacttccattaaaattagaagcaataccattgctatactctcctagaatatcctactttagaaaaataaatgatgatggttacgtactagcttacccatttggtaccgaagaatctcacaattgtctgattggcaagaatcatccagaattgacgcaggagaaattagcaactgaaagaaaacgagaaatagaagaacaactaaaattattacatattacgttaagcgaattgcaatcgaacaaaggcggaggttcggtaagtggaaattcggagcgctatgcacgcgaattaaaagcagaggtagctgaattaaaccacagattgcacacagtcaacaccatcttgagcgatttaaaaatctcggagactattcctggaggaaatactgatggtgatagctccagctcactctccgatactgatgtaaatttggaaaatgcaccgccaattcaaaatagaatatcgctattgaggaccaataccgtggagtcttttgtatcaatgagaaaagcctctactatgcaggttgagtccacctatgataaccgtttcatggtccataatatcgagttaaaaatcgataataaaatcaggcatcaccttttggaatacgcttccagtgctttcgaaaggaaatctatgaggtttgctgtgacttataaatccgtaactattttaaaagaattactgggaaatgtgttgactggggtcagaacatctgtagaagattatggttcaatacttgaggacgatttagccagtaattcagaatttattgagcactttgagaaactcatcagagaagttccgagtgatgactttgattatgttgataattatctttttagactaatctcccctcaggttcagatcaaatcggacgttgaaaggaacgcagcagttattttagctgctagggatatagaaatgggaataattgatatagttcaagtgtatggaaaatcaggaaaaagaattcccgttgacgtcgatactattgttgaaactcgctattccgctgtttcaaaggacattcagttgtttacattgttcaaaaaggatttagagggtcctgaaggtagatttttccataaaaatggatatggttccgacaaagagtcagatatatggcccccatggattcctcttgaaatgtgctttgacgggtctttattagataagcatgtttttctaaaacggagatcaatgtttttgacctacgtcgctcccaatcccctattttttagtgcaaatgatacgtctgcattctcttatgattcgagatttcgtattgcatttccaggattggttctgacctcggactgtcaacaatactgcgctgtatatgcaatcgcagaagatttactttcctttggatcatcattggatgaaaaagttgagaaactttccaggatattatttactgatgaggtcagaaataacctggaaaatcttgatgtctctgttgtcacagcattacaagaaagaataaaggaactctattatacgcgagcatacctcaaacttcacgagccaagattgtttatgaaatcaggacaagagctaaccttcgatattcaaactagtacgttgaagttgacgttacttatgacggcaatcaagaaaacttacgaccggatggggagtggtaatagagtaatacagaaaagattgaggtggcaagttggaacagatgaattgatatgggaattgtacgatgagagtaaaactcctttcgtgactatcggattggggccctctacatttattcgttcagaaacttccgatggcactaatagtaataaagtatccatttcttccttacaatgtttcaaccagcaagaaaatcccgtttacactgaattgctggcccccttttatgaaaattcatcctataataagaacgcgccaatggtagaaattttttggatcctggggccatcagttggaggtatttcagatctgcaagatttgattgtttctctacagccattgattttcaagatggatcacaaaacatcggaaaaactaatgaattatctatttccaaagatagaacaaacttccatagaacccaattctccagaacttgtaccacgttcttccactagttccttcttttcatcgtctccagttttacggcacagtctttctaacggttctttatctgtgtacgatgcgaaagacgttgactcttgggacttgcgtagtatccagagcaaagaaggtatcaaaaagcataagggtgatcatagaaaattgtcagcatcactttttgtgcaacctgattataacatcaatgaaatggtcaaaagatcagggacatttttcaatgtaaaatctattataatccgaaaaactctaatgtccgtgtgttataagggttcacacagccttttgaccgatgttaataacctgattgttagagtccctgttttaaagtaccataacaaactgtggtcgagggaagaattttttactgctttgaaaagagacgtcgtaagaatagttttacaacatttgggaaatattattggtaacaaatttttgcctcataaaaaagagaataagaaaaaaacttctatggaaatacatcgattactaagtccagattctcaaaatcgtgataattcacatatccttgaagtcgaagggcataattcattttatagctccacgcactcttcagatatcagatcaataaactcagatgaaacgtataatgaaaatgatggaaatggagtaaagccattttaccctgttacgagtgagttttcaaaaaataaatga

SEQ ID NO: 11650 - DNA, 7470 bp, Artificial Sequence
  Description of Artificial Sequence: Synthetic polynucleotide
atgtctatgttaccgtggtctcaaataagggatgtgtctaaattattattaggctttatgctttttattatatctattcagaaaatcgctagtattctcatgtcttggatattgatgttacgccattccacaataagaaaaatttcctttggatacttttttggtacgtctataagaagagcgtttatcttaactgattttgctcaaatatatattggcaagataaccttgagaataggttggaaacccggaattgtgtttcataatgttgatttgaagttatttgggaaggacagccatatcactgcacattctactaaagactccagaacatatttcaatccgagagatcaaacttttacctttgtaattaacaggagagtcctttctattttgaaacttgtgttctccttttccactttctttcatactttagctcttacagtgcctaatggaaaacaatataaattaaatatcggatccataacgatatctcacccacacgatgataccataaagttagaggcatttttgcatgattttacccatcctgaaacgaaagatactttgaaccatactggtttttttatggtctgtaaaattggaaaggaagatgatacaggcagcaactgcacaaaagttatattgaaaaattggaaatctagtctcaaaataagtgatgtttgttggcatcttccagagaagaaagggaagaatttgcattctgagcctgttgagcctttttctgctggtgatgatgcggaaatgctcacttcttatcgtaagatgttgaagccttttcactacccattgaaaactttgaacattttggaccttaaggtagaaaatgtaaagttgatttacaaaaaaaagtttacaattcgcatatctagtgctcaactttacttggaaagtatctccattttgaataatgtctccgctttggaacttttacccttaaataagcccacatggggcgattttgaattatctctttctgcaaatgctgttgtagtagatatcgatggtaatacagcagttagaattccatttggaaatgtcatattaacgtctgatattttactttttttacttgacaatgtacctttaagaagaacgaaggtatcttccattttgaacattataaatccttctgtattcctcactatacatcaagtattggaagttcttcatttagtggacaaattcgatagccctgagacctcttcttgtactaacacaaacgacagatctttaaatattttagatttagatattgatagattgcccagttttaactttgaattattgatgagtaattttatttctaggttacatatatctgatgaggagaatgtgacgtttaaggtcttcagcacacatgctctctttagccgtaacaacttgtctatgactcctaaaaagggacaagtaatgcaaatacgtccggattggccatttgcgaagacagccttggtatctgatcaattatctaactatattaaaattgtgggtacatctctctcttacttgagaattccaacagagcaggacgctaacccagtgtctataccagtctgtggctttgaaagattagacacatttttggatgaattttctaattctaaattgatcgttcagtctacattaagacattcttacgttagtcttgagaacattgaagttttgcatactttaagtcgcgcctttgacaaaatttacttgttaatatctagcagaacaaaaaggaatgcggctcataaagcgaatggtggaaaattgggggacttgaatgaagccaagaaaacatttaactggtctttgaaacttagaatgaaggatattagttgttctttattggtcgctgggtttcttccgaaaaatttggatcctgtggaagctgagaattttaacttatctgacgtaactagaggcgccaaagttgtttttacagaaagtatattgttagcggacagccaggagaaaaacttcactattattgatgcatccgtatatcgtttcatggatggcactacgtataagccctctcctgaggttattattcaatttaccaatttgttattgagttttaacgacagtgatgaaattcatttttcccttcccaagattaaatttaagatggatgtaaatattatctggttgtggttttatattagaagtatatggataaaatttcgtcctaattctaaattgagcagaaattctgtgagcagtgtaaaatctgtcaatgttctcgatagattaagagtagatataggaaagatgattatagagcttacgcttcctcataatacagaggtactcttaatattcgagaggattggactttccagttccactaaaaatcttacaattgcatctttgagtgcgtacgtggtatctgtttatgtgaagcatattaaggtttatgtttccttgttgaatattaatgactttgagttggacactgaagagttgatctgcaagaaatccgctgttataaacacctctttgattcattttcatgccgaatatcattttagattttacatgataacggataacatagtcacgttgtataaaagttttaagcaaattaaattggcattttccaatttgaatgaatttaagagattataccctcagcaacagtttccgaaaaaagttccaaatttacatatttgttgccaggattttttgattgatattgaagaagatccttttgagcaggagttaggattaattttgaaagttggtgttttggaacaacgtgagaggttaaagaagcttgaagagttcaaggaaaagttatctacatatgaggacatgaatgtacgtttaaggtctctctatgatacctcccgtggacaaagttttttcccagagttttatgcgaatgatcaagaatatgagcaaaaggcctatctcaggttgttagaaaacttttctacgagctggattgccagatacaggaaagcaaaactttctttttatggtatgccttatagagttatcagccgtgaagagcttggtacgaaataccacttgtttactagacagaaaaccagtactgttgctaacctcgtcgtaaaagatttggattttaaattgggcagtccttccttccctttagacaattatatggattttgtttaccagtatggaaaaaaagttccaaaatctacggagtacactttgttaattattcttggcctcaaaatcaaaagcgcgttatgggagttgcgtttaagagattatccaatacctgctatatcctttcccgacacatttacaacaggtgatgttgtatttgctgaaaagatgccagcaccttgcgcgcttcatactgtttatgttccttttgtcagctctgcccaaagaagcccctataatgacgccaatacaatatatggtttgcacatcattcgtacaattaattctgtcaaaacatatttcaatattaggtctatggttacatcttcttcttctgccagaataacatgggggaaatctttacaacccggttatgagtctttgatgctttggtttgattttttaaccaaacctctcatcgatccgtccaaaaagttgggattttgggacaaattcagatatttagtgcatgggaagtggatatacgagttttctgaggaaagtgagatccacttaaatattaaaggttctcatgatccttataagattacagatgatggtgcgggtttggcgttctgctggtctggtggcaccacaatttacgttcataactccacggatcctaaagagtttttaaaaattgaatcccaaaggtttcagttggcagtgccagactttgccaaagttagtaaatttgataaagtctttatgaagctcgatggaagagtaatttggacattaggtttactttttgaacaaggcgatatatctaaggctggtgacgaagagaggttccttccaaataggccacattatgaaatacagttgatgaatccagatggagtcgcagatttggatcaccatgatacatacaaaggatttagaacatcttttatccacatgagttttggtgtctattcttctgagcacggatccataaatagtctctatctcgcaccttacgctttaacacatttctttaagtggtggaatttatttcatacatatacatctggtcctattaggcaaggaagattatttacggatgtacttcaaaacaagacaaagtttggtcgctctttatttacaatagcttatcagttacatttaaaaagattaatggttacgcatatttatagacatattactactcaatatgatcttgaaaaagaccgcaaaataacttttactggattgaaagggaggtttgattctttgaaaattgatttgcatcaaaaaagagttaaattgacccatacgaaccaaaaattaaataagagtaaacctgtatggaagtttaagatgtctaggggtgagattgattgtgcagaagcagatattaggatattatctactttatttgatcaggaagcagttaaggaaattcttacttctggactcgatggcatacttgaagacgagccatctcgtcctattacgcctcaagatgtggaatacttgcgtgaaagtgattggtatgattatgaggattatatagacttgaatcaagtgccgcttggttcctctcttccattaaaattagaagcaataccattgttgtactctcctagaatatcctactttagaaaaataaatgatgatggttacgtattggcttacccatttggtaccgaagaatctcacaattgtttaattggcaagaatcatccagaattgacgcaggagaaattagcaactgaaagaaaaagagaaatagaagaacaattgaaattattacatattacgttaagcgaattgcaaagtaacaaaggcggaggttctgtaagtggaaattctgagcgctatgcacgcgaattaaaagcagaggtagctgaattaaaccacagattgcacacagtcaacaccatcttgagcgatttaaaaatctctgagactattcctggaggaaatactgatggtgatagctccagctctctctccgatactgatgtaaatttggaaaatgcaccgccaattcaaaatagaatatctttgttgaggaccaataccgtggagtcttttgtatctatgagaaaagcctctactatgcaggttgagtccacctatgataaccgtttcatggtccataatatcgagttaaaaatcgataataaaatcaggcatcaccttttggaatacgcttccagtgctttcgaaaggaaatctatgaggtttgctgtgacttataaatccgtaactattttaaaagaattattaggaaatgtgttgactggggtcagaacatctgtagaagattatggttccatacttgaggacgatttagccagtaattctgaatttattgagcactttgagaaactcatcagagaagttccgagtgatgactttgattatgttgataattatctttttagattgatctcccctcaggttcagatcaaaagtgacgttgaaaggaacgcagcagttattttagctgctagggatatagaaatgggaataattgatatagttcaagtgtatggaaaaagtggaaaaagaattcccgttgacgtcgatactattgttgaaactcgctattccgctgtttccaaggacattcagttgtttacattgttcaaaaaggatttagagggtcctgaaggtagatttttccataaaaatggatatggttccgacaaagagtctgatatatggcccccatggattcctcttgaaatgtgctttgacgggtctttattagataagcatgtttttttgaaaagaagaagtatgtttttgacctacgtcgctcccaatcccttattttttagtgcaaatgatacgtctgcattctcttatgattccagatttcgtattgcatttccaggattggttttaaccagtgactgtcaacaatactgcgctgtatatgcaatcgcagaagatttactttcctttggaagttctttggatgaaaaagttgagaaactttccaggatattatttactgatgaggtcagaaataacttggaaaatcttgatgtctctgttgtcacagcattacaagaaagaataaaggaactctattatacgagagcatacctcaaacttcacgagccaagattgtttatgaaaagtggacaagagttgaccttcgatattcaaactagtacgttgaagttgacgttacttatgacggcaatcaagaaaacttacgacagaatggggagtggtaatagagtaatacagaaaagattgaggtggcaagttggaacagatgaattgatatgggaattgtacgatgagagtaaaactcctttcgtgactatcggattggggccctctacatttattcgttctgaaacttccgatggcactaatagtaataaagtatccatttcttccttacaatgtttcaaccagcaagaaaatcccgtttacactgaattgttagcccccttttatgaaaattcttcctataataagaacgcgccaatggtagaaattttttggatcttggggccatctgttggaggtatttctgatttgcaagatttgattgtttctttgcagccattgattttcaagatggatcacaaaacaagtgaaaaattaatgaattatttatttccaaagatagaacaaacttccatagaacccaattctccagaacttgtaccacgttcttccactagttccttcttttcttcttctccagttttaagacacagtctttctaacggttctttatctgtgtacgatgcgaaagacgttgactcttgggacttgcgtagtatccagagcaaagaaggtatcaaaaagcataagggtgatcatagaaaattgagtgcatctctttttgtgcaacctgattataacatcaatgaaatggtcaaaagaagcgggacatttttcaatgtaaaatctattataatcagaaaaactttaatgtccgtgtgttataagggttctcacagccttttgaccgatgttaataacttgattgttagagtccctgttttaaagtaccataacaaattatggagcagggaagaattttttactgctttgaaaagagacgtcgtaagaatagttttacaacatttgggaaatattattggtaacaaatttttgcctcataaaaaagagaataagaaaaaaacttctatggaaatacatagattattaagtccagattctcaaaatcgtgataattctcatatccttgaagtcgaagggcataattctttttatagctccacgcactcttctgatatcagaagtataaacagtgatgaaacgtataatgaaaatgatggaaatggagtaaagccattttaccctgttacgagtgagttttccaaaaataaatga

SEQ ID NO: 11651 - DNA, 1236 bp, Saccharomyces cerevisiae
atgtcgttggaagccatcgtctttgatagatcggagccagaaaatgtttcggtaaaggtacttgatcaattacttttaccatatactactaaatacgttccaattcacacaattgatgatgggtactcagtcatcaaaagtatgcaggtgagaggtgccccggcaattgcaattgtgggttcgttatctgttttgactgaggtacaattaataaaacacaacccaacttctgatgttgctacgctgtattctttagttaactgggaatctacaaaaacagtgctaaataagaggctagatttccttttgagtagtagacccacagccgttaatttatcaaattctcttgtagagataaagaacatactgaaatcctcaagtgacctaaaggcttttgacggtagtttatataattacgtctgtgaattgatagatgaggatttggcgaataacatgaaaatgggtgataatggagctaagtatttgattgacgtgttacaaaaggacggtttcaaggacgaatttgccgttctgacgatttgtaatactggatccttagcaacctctggatatggcacggctttaggtgttatccgttctttgtggaaggattcacttgctaaaaccgacaaggcagactcgggattggacaatgaaaaatgcccgaggatgggccatgtcttcccactggaaactagaccttataatcaagggtcaaggctaacagcatacgagctagtttatgataagattccatcaactttaattactgatagttccatcgcgtatagaattagaactagtccaattccaatcaaagcagcatttgttggagctgatagaattgttcgtaatggggatacagcaaataaaattggtactttacaacttgctgtaatttgtaagcagttcggaattaagttttttgtagtagctcccaaaacaactatcgataatgtaaccgaaactggcgatgacattattgtggaagaacgtaaccctgaggaattcaaggttgttactggtacagtaattaatcctgaaaatggttccttgatattgaatgagtcaggagagccaatcactggaaaggtcggtattgcccctcttgaaatcaatgtctggaatccagccttcgacattactccacatgagcttattgacggaattatcacagaagaaggtgtatttaccaaaaattccagtggtgaatttcaactggaaagccttttctag

SEQ ID NO: 11652 - DNA, 1236 bp, Artificial Sequence
  Description of Artificial Sequence: Synthetic polynucleotide
atgtctttggaagccatcgtctttgatagaagtgagccagaaaatgtttctgtaaaggtacttgatcaattacttttaccatatactactaaatacgttccaattcacacaattgatgatgggtactctgtcatcaaaagtatgcaggtgagaggtgccccggcaattgcaattgtgggttctttatctgttttgactgaggtacaattaataaaacacaacccaacttctgatgttgctacgctttattctttagttaactgggaatctacaaaaacagtgttgaataagaggttagatttccttttgagtagtagacccacagccgttaatttatccaattctcttgtagagataaagaacatattgaaatcctccagtgacttgaaggcttttgacggtagtttatataattacgtctgtgaattgatagatgaggatttggcgaataacatgaaaatgggtgataatggagctaagtatttgattgacgtgttacaaaaggacggtttcaaggacgaatttgccgttttgacgatttgtaatactggatccttagcaacctctggatatggcacggctttaggtgttatccgttctttgtggaaggattctcttgctaaaaccgacaaggcagactctggattggacaatgaaaaatgcccgaggatgggccatgtcttcccattggaaactagaccttataatcaagggtctaggttgacagcatacgagttagtttatgataagattccatctactttaattactgatagttccatcgcgtatagaattagaactagtccaattccaatcaaagcagcatttgttggagctgatagaattgttcgtaatggggatacagcaaataaaattggtactttacaacttgctgtaatttgtaagcagttcggaattaagttttttgtagtagctcccaaaacaactatcgataatgtaaccgaaactggcgatgacattattgtggaagaacgtaaccctgaggaattcaaggttgttactggtacagtaattaatcctgaaaatggttccttgatattgaatgagagtggagagccaatcactggaaaggtcggtattgcccctcttgaaatcaatgtctggaatccagccttcgacattactccacatgagcttattgacggaattatcacagaagaaggtgtatttaccaaaaattccagtggtgaatttcaattggaaagccttttctga

SEQ ID NO: 11653 - DNA, 1476 bp, Saccharomyces cerevisiae
atgtccaacccaatagaaaacacagaaaactcacagaatactagttcatcaaggtttttgaggaatgtacaaaggttggccttaaacaatgtaacaaatacgacatttcaaaagagtaatgcgaataatccagccctaacaaatttcaaatctacactaaactcagtaaagaaggagggaagtcggattcctcaatttactagagaaagcgtatcaagatcaacagccgcacaagaggagaaaagaaccctgaaagaaaatggtatccaactccccaaaaacaatcttttagatgataaagaaaaccaagacccaagtagtcagcaatttggtgcgctaacttctataaaggaggggagagctgagctgcctgcaaatataagtttacaagaatcctcctcagcgaaggagataatccagcatgatcccctaaaaggcgttggatcaagcactgaggtagtccataactcggtagaaaacgaaaaacttcatccagctagaagtcaacttcaagttagaaataccgaaagtgaaactgatagtggaaaaaaaagaccaatttctacaattgttgaacaagaactgcccaaaaagtttaaagtgtgcgatgaaaatggcaaagaagaatatgaatgggaagacctagatgcagaagatgtaaatgatccattcatggtcagcgagtacgtcaatgatatattcgaatatctccaccaactagaggtcattactcttccaaagaaggaagatctctatcagcatagaaatattcatcaaaatcgagatatcctagttaattggttggttaaaatccataataaattcggcttattaccggagactttgtatcttgccattaacataatggacaggtttttaggtaaagagctagttcaactggataagttacaattggttggcacatcatgccttttcattgcctctaaatatgaagaggtctattctcctagtataaaacatttcgcatcagagacagacggtgcatgtacggaagatgaaatcaaagaaggggagaaattcattttaaagacattgaaatttaacctaaattatcccaatccgatgaattttctgagaagaatttcgaaagcagatgactacgatatacagtctcgaactcttgccaaattcttattagagatatcattggtagatttcagatttattgggatactaccctcattgtgtgcagcagctgcgatgtttatgtcgagaaaaatgttaggtaaaggtaaatgggatggaaatctaatacactatagcggcgggtatactaaagaagaacttgcgcccgtgtgtcacatgataatggattatctagtgagtccaattgttcatgatgaatttcatagaaaatatcaatctagaagatttatgaaagcttctataatttccgtccaatgggctttaaaggttagaaaaaacggctatgatataatgaccttgcatgaatga

SEQ ID NO: 11654 - DNA, 1476 bp, Artificial Sequence
  Description of Artificial Sequence: Synthetic polynucleotide
atgtccaacccaatagaaaacacagaaaactctcagaatactagttcttccaggtttttgaggaatgtacaaaggttggccttaaacaatgtaacaaatacgacatttcaaaagagtaatgcgaataatccagccttaacaaatttcaaatctacattgaactctgtaaagaaggagggaagtagaattcctcaatttactagagaaagcgtatctagatctacagccgcacaagaggagaaaagaaccttgaaagaaaatggtatccaactccccaaaaacaatcttttagatgataaagaaaaccaagacccaagtagtcagcaatttggtgcgttgacttctataaaggaggggagagctgagcttcctgcaaatataagtttacaagaatcctcctctgcgaaggagataatccagcatgatcccttgaaaggcgttggaagcagcactgaggtagtccataactctgtagaaaacgaaaaacttcatccagctagaagtcaacttcaagttagaaataccgaaagtgaaactgatagtggaaaaaaaagaccaatttctacaattgttgaacaagaattgcccaaaaagtttaaagtgtgcgatgaaaatggcaaagaagaatatgaatgggaagacttggatgcagaagatgtaaatgatccattcatggtcagcgagtacgtcaatgatatattcgaatatctccaccaattggaggtcattactcttccaaagaaggaagatctctatcagcatagaaatattcatcaaaatagagatatcttggttaattggttggttaaaatccataataaattcggcttattaccggagactttgtatcttgccattaacataatggacaggtttttaggtaaagagttagttcaattggataagttacaattggttggcacatcctgccttttcattgcctctaaatatgaagaggtctattctcctagtataaaacatttcgcaagtgagacagacggtgcatgtacggaagatgaaatcaaagaaggggagaaattcattttaaagacattgaaatttaacttgaattatcccaatccgatgaattttttaagaagaatttccaaagcagatgactacgatatacagtctagaactcttgccaaattcttattagagatatctttggtagatttcagatttattgggatattgccctctttgtgtgcagcagctgcgatgtttatgagtagaaaaatgttaggtaaaggtaaatgggatggaaatttgatacactatagcggcgggtatactaaagaagaacttgcgcccgtgtgtcacatgataatggattatttggtgagtccaattgttcatgatgaatttcatagaaaatatcaatctagaagatttatgaaagcttctataatttccgtccaatgggctttaaaggttagaaaaaacggctatgatataatgaccttgcatgaatga

SEQ ID NO: 11655 - DNA, 1308 bp, Saccharomyces cerevisiae
atgggagagaaccacgaccatgagcagagtattaaaagaaattctatgatttataatgaaaatgagaggcagttgtgcaattcaaacctaaagattcttcaaaataaaagggccctttcaaaaaatgacagctctagtaagcagcaggttcaggattctaaaccaagaagggctttaacagatgtaccagtgaacaataatcctttaagccagaacaagagaatagtagcagggagcaaggcggccaaagtacgaagagaagaaaacattagacctattgttagcgccgttcaaaaaagacagatatataacgatcgaacggcagcagagcaagaagaagaagaagaagaagaaggagaagatgatgatgctgcttcgatagtgaacaaaaaacgcagaatagacgctgaaggagtgagtgaaatagtaggctggcaggacctagattatgttgaaaaagatgatactgcaatggtagcagaatattctgctgaaatttttgcatttttatatagaagagaattagaaacgttaccatcgcacaactatttactcgacaaaacgtccaagtattatttgaggccttccatgagaacaatattagtggattggctggtagaggtgcacgaaaaatttcaatgctatccggaaacgttattcctatccataaacttaatggatagatttttagctaaaaataaagttacgatgaacaagttacaattattggcagttacctcacttttcatcgcggcaaaatttgaagaggtaaatttgcccaaactagctgaatacgcttatatcactgacggcgcggcttctaaaaacgacataaaaaatgcggaaatgttcatgctcacttccttagaattcaacattggttggcccaacccactcaatttcctaaggaggatctccaaggcagatgattacgatccggttaatagaaatattggtaagtttattttagagtatgcctactgctgccaccaattcattcatttacctccatctaccgtaagcgcaatggcaatgtatatagcgagaagaatgaccaacagaaacaagaacgagctatggaatggaacactacagcattacagtggtggtatcgatccaatacacgatgaagcgtttcagtctctctgcattgatctagtcaaagacatcgctagttccaaaactcatttagattcattgattttgaagtacaagaaaccaaggtatggctctgtttatttccaaactttcaagtggtgtacatccgaaatgcatagcaactttcaaaatctatttaatcttaagtag

SEQ ID NO: 11656 - DNA, 1308 bp, Artificial Sequence
  Description of Artificial Sequence: Synthetic polynucleotide
atgggagagaaccacgaccatgagcagagtattaaaagaaattctatgatttataatgaaaatgagaggcagttgtgcaatagcaacttgaagattcttcaaaataaaagggccctttctaaaaatgacagctctagtaagcagcaggttcaggattctaaaccaagaagggctttaacagatgtaccagtgaacaataatcctttaagccagaacaagagaatagtagcagggagcaaggcggccaaagtaagaagagaagaaaacattagacctattgttagcgccgttcaaaaaagacagatatataacgatagaacggcagcagagcaagaagaagaagaagaagaagaaggagaagatgatgatgctgcttctatagtgaacaaaaaacgcagaatagacgctgaaggagtgagtgaaatagtaggctggcaggacttggattatgttgaaaaagatgatactgcaatggtagcagaatattctgctgaaatttttgcatttttatatagaagagaattagaaacgttaccatctcacaactatttactcgacaaaacgtccaagtattatttgaggccttccatgagaacaatattagtggattggttggtagaggtgcacgaaaaatttcaatgctatccggaaacgttattcttatccataaacttaatggatagatttttagctaaaaataaagttacgatgaacaagttacaattattggcagttacctctcttttcatcgcggcaaaatttgaagaggtaaatttgcccaaattggctgaatacgcttatatcactgacggcgcggcttctaaaaacgacataaaaaatgcggaaatgttcatgctcacttccttagaattcaacattggttggcccaacccactcaatttcttgaggaggatctccaaggcagatgattacgatccggttaatagaaatattggtaagtttattttagagtatgcctactgctgccaccaattcattcatttacctccatctaccgtaagcgcaatggcaatgtatatagcgagaagaatgaccaacagaaacaagaacgagttatggaatggaacattacagcattacagtggtggtatcgatccaatacacgatgaagcgtttcagtctctctgcattgatttggtcaaagacatcgctagttccaaaactcatttagattctttgattttgaagtacaagaaaccaaggtatggctctgtttatttccaaactttcaagtggtgtacatccgaaatgcatagcaactttcaaaatttatttaatcttaagtga

SEQ ID NO: 11657 - DNA, 1719 bp, Saccharomyces cerevisiae
atggttatcatcctcctaggtctttgcacattaggttttccaagaacagcattctgtccctccataatgacaaattctacagtgagtattaacacgcctccaccatatcttactctagcttgtaatgaaaaattaccaacagttatgtcaattgctggatcagactcaagtggtggagccggtgttgaagctgatattaagactatcaccgcacacagatgttatgccatgacatgcgtcactactttgactgctcaaactccagtgaaggtgtacggcgctcaaaatataccaaagaaaatggtatctcaaatattagacgccaatttacaggacatgaaatgtaatgttattaagactggcatgcttacggtggatgcaatcgaagtcttgcacgaaaaacttttgcaacttggtgaaaatagacccaagttagtaattgatccagttctttgcgccgcttctgactcttctccaactggaaaggatgtggttagcttaatcatagaaaaaatttctccttttgccgacattttaactcctaacatttcagactgtttcatgttactgggcgagaacagagaagttagcaaactacaagacgttcttgaaatcgcgaaagacctttctagaatcaccaattgctccaatattttagtgaagggaggccacattccatgtgacgatggaaaagaaaagcatattactgacgttctttacttaggtgctgaacaaaaattcatcacttttaagggccaattcgttaatactacacgcactcatggcgctggatgcacactggcttctgctatagcatctaacttggctcgcggttattctctttcccaatctgtttatggtggtattgagtatgtacagaatgccatcgcaattggctgtgacgttaccaagaaagctgtgaaggttggaccaattaatcacgtttacgccgtagagattccattagaaaaaatgctcaccgacgaatgctttacagcatctgatgctgtacctaagaagccaatcgaaggttctcttgacaaaatccctgggggtagcttctttaattatctgataaatcatcctaaagtcaagccgcattgggatgcctacgtgaatcacgaatttgttaaaagagtggcagacggcacattggaacgcaaaaagttccagttttttattgaacaagattatttatacttaattgattatgtgagagtttgctgcgtcacaggtagtaaatctccaactctagaagatctagaaaaggaccttgttattgctgattgcgcccgtaatgaactaaatgaacatgaaagaagattaagagaagaatttggagttaaggacccagattacttacaaaaaattaagagaggtcccgcattaagggcctactgtcgttacctaattgacatttccagaagaggaaactggcaagaaatagttgtagccctcaacccttgtctaatgggttatgtttatgctgtagacaaagttaaggataagataacagcagcagagggttctatttatagtgaatggtgtgatacttgcgcgtcttcattttgctaccaagctgtgcttgaaggtgaaaggctcatgaatcacatcttggaaacatatcctccagatcaacttgattctttggtgacgatctttgcaagaggttgtgaattagaaactaatttctggaccgccgccatggaatacgaatga

SEQ ID NO: 11658 - DNA, 1719 bp, Artificial Sequence
  Description of Artificial Sequence: Synthetic polynucleotide
atggttatcatcctcttaggtctttgcacattaggttttccaagaacagcattctgtccctccataatgacaaattctacagtgagtattaacacgcctccaccatatcttactttggcttgtaatgaaaaattaccaacagttatgtctattgctggatctgacagcagtggtggagccggtgttgaagctgatattaagactatcaccgcacacagatgttatgccatgacatgcgtcactactttgactgctcaaactccagtgaaggtgtacggcgctcaaaatataccaaagaaaatggtatctcaaatattagacgccaatttacaggacatgaaatgtaatgttattaagactggcatgcttacggtggatgcaatcgaagtcttgcacgaaaaacttttgcaacttggtgaaaatagacccaagttagtaattgatccagttctttgcgccgcttctgactcttctccaactggaaaggatgtggttagcttaatcatagaaaaaatttctccttttgccgacattttaactcctaacatttctgactgtttcatgttattaggcgagaacagagaagttagcaaattacaagacgttcttgaaatcgcgaaagacctttctagaatcaccaattgctccaatattttagtgaagggaggccacattccatgtgacgatggaaaagaaaagcatattactgacgttctttacttaggtgctgaacaaaaattcatcacttttaagggccaattcgttaatactacacgcactcatggcgctggatgcacattggcttctgctatagcatctaacttggctcgcggttattctctttcccaatctgtttatggtggtattgagtatgtacagaatgccatcgcaattggctgtgacgttaccaagaaagctgtgaaggttggaccaattaatcacgtttacgccgtagagattccattagaaaaaatgctcaccgacgaatgctttacagcatctgatgctgtacctaagaagccaatcgaaggttctcttgacaaaatccctgggggtagcttctttaattatttgataaatcatcctaaagtcaagccgcattgggatgcctacgtgaatcacgaatttgttaaaagagtggcagacggcacattggaacgcaaaaagttccagttttttattgaacaagattatttatacttaattgattatgtgagagtttgctgcgtcacaggtagtaaatctccaactttggaagatttggaaaaggaccttgttattgctgattgcgcccgtaatgaattgaatgaacatgaaagaagattaagagaagaatttggagttaaggacccagattacttacaaaaaattaagagaggtcccgcattaagggcctactgtcgttacttgattgacatttccagaagaggaaactggcaagaaatagttgtagccctcaacccttgtttgatgggttatgtttatgctgtagacaaagttaaggataagataacagcagcagagggttctatttatagtgaatggtgtgatacttgcgcgtcttctttttgctaccaagctgtgcttgaaggtgaaaggctcatgaatcacatcttggaaacatatcctccagatcaacttgattctttggtgacgatctttgcaagaggttgtgaattagaaactaatttctggaccgccgccatggaatacgaatga

SEQ ID NO: 11659 - DNA, 3627 bp, Saccharomyces cerevisiae
atgtccttgagagaagtaactaattatgaagtctcgttttacatcccgttgtcttacagcaacaggactcataaagtttgtaaactgccaaacggaattttagcattaataatatcggatccaacagatacttcaagctcatgctcactgactgtttgcacaggttcccataacgatccaaaggatattgccggtttggcgcacctttgtgagcacatgattctttctgccggttccaaaaaataccctgatcctggtttattccacacactaatcgcaaaaaacaacggctctcaaaatgcctttaccacaggggagcaaacgactttttattttgaattgcccaatactcaaaataacggcgaatttacatttgaatctatcttagatgtgtttgcctcattcttcaaagaaccgctcttcaaccctttactgataagcaaggagatatatgcaatacaaagtgagcatgagggaaacatatcatcaaccacaaaaatattctaccacgcagcaagaatattggccaatcccgaccatcctttcagtcgcttttccactgggaacatacactcgttatctagcattccacaactgaaaaaaataaaactaaagagctcattaaacacttacttcgaaaataatttttttggggagaatataaccttgtgcataaggggaccgcagtctgttaatattcttacgaaactagctctatcaaaatttggcgatataaaacccaaaagcgctgtaaaggaaaggagtatatcgattaggacgaggtcatttcgaagatcgaagtctttaaaaaaacgccaagattcttccaaaaacgactacagtgacttgaaaacctttaaaatactgaacacaacgtgggaaaaaaaatacaaaaatacgatgtgttttcaacaatttcctgaatgcaattcgatatttatcaattcaaataaggtacctataatgagacttctctttcctgttagcgataaaaacactcggtttacaaaggatgacattaaaatatacagtcatctttggtgtgaacttttcggcgatgagtctccaggatctttgagctattacttagcttcaaaaggctggctcacaggctgttttgcctttacctcagaattcgctattggtgacataggattaattttggaattagaactgacaaacagtggctgggaaaatattaagagaattacgacaatagtacttaatagactcttgccttccttttacgtaatgaacatcgattacttaatcacttttttgaaagaacagaatttgatcgacctcgttagctttctgtaccaaagttcagaggatcttccaatggaagagtgctcaaaattaagcggtattcttcaggacgatttagaatgtttaaccccccctaatatattcaaaggatttaaatctcttatagaaatagatgatcccaacatcgaaaaatatgaaaacacaaaggccaatatacaatggtggacagggcaagctattaagttccaaaattttttaaaatctttcatgaatcatgacaacatgcgccttttactcttagggaatataaaatctggtaatatatttgataaaatgaaaaataaaagtgatatatgcaccgattttttctatgaatttgagtattatacggcaaacgttcatctagcaagtgataataaatttcattcaaacagctcgtatgaatttaattttcccacaggtaatctttttttaccagattgcgtcagcgatcctttaaaactacaacagctcttcttagaatgctcgttaaaatcgaaatttgctacgcttagacctcaaatttatagtgagcccactaggacaaagcctcaattagtcagtgagaaccagaattatgagatgtggatcttaaaagaagacccaaattttgcctcagacaataaatccgtcgtatcatttgaagttttggggttaggcatcaaacctagtccggaggcaacaatccacctggaagtactagcacaggcattatttatcatcacctcttcattcctttatcccgctctgagaattggttacacatatgagattgcctcatctagtaagggcaacgtaacactgcgatttactatttctggattccctgagggtgttttcacaatagtaaagacgttcgtggatacgctaaaacttattgcaacagatccaacgtttctttctaaagataccttgagaaaggcaaggattttagttagaaataaatacaagaacgcgtcatcggacaactgcgtgaagctagctagcgttggattgctgattgttttagagaaatatatatggactttagaggatagaattaatgcattagagcttaccgagttggaatccttcgaaaaattttgttttttattctggaggaatcctaaacatttggtcttgttcatgcagggaagccttgaatatgctgacgcaatcaaccgttacttaaataacaattttacgcagcacctaaaaatcagcaatgaagggagcaaaccgaccatacgtctctaccctcctcccagtacaaaagatctagatcaaggcacaaatgcctttatatcatataatggtcaccaggatgatcccaacaatagtattgtgtattttattcagactgcacaaagagatgacatcaaaaatctgacactaacctttcttaccgaatatctattttcactaacgctagtgcctgatctaagaaataaaaagcaaattgggtacattgttttgggaggactcagggttttaacagacactgttgggattcatataaccgtaatgtctggcagctcggggcacaatctggaaactaggatcaatgagtacttatcttacttgcagctgcaggtgctaaatagattcaccgagtttgattttcgaaggatacttctagagccgttcttaaatcttttaaaacagaacagtacgaaacagtttgaagggtcggctggtcctgtagacctattaaatgagatagtggcaaatgtgcaaaatggtgataattacactctcaacaataaacaaatgagacaacataggaaggtaagaaataaaattgcggaaggaaggcttaattttcaagaagatcatgaaatgattgatatctcatttttgcaaaaattaactctaaagaaatatttagcattcttcgagtccaaaatctctatatattccgctcaaagaagtaagctatcaataatgatcacaagtccaatggcagagaaggaaattgcaagcaggaaaatgttccttcagctagaggcctttctgaaaataaacggattcgccataaaaaatgaagacttgaagaaaattgtcgaacattcaaagggaaatcctattttacttgtaaagaacctttttacttattttcgtaggagaaatgaagttttcaagctcggaaccgttgtattgcaggaaatattgaaaatcatcggaatgaatcttaagcagagatacggctctatattagggttttcttcccaagatggtgaaggacaagaaatagaaaaattttggaacaacgacacaagtccgattgttcctcttcaggagcttcctgaaccaaactttttccgcaaggccgcattttga

SEQ ID NO: 11660 - DNA, 3627 bp, Artificial Sequence
  Description of Artificial Sequence: Synthetic polynucleotide
atgtccttgagagaagtaactaattatgaagtcagtttttacatcccgttgtcttacagcaacaggactcataaagtttgtaaattaccaaacggaattttagcattaataatatctgatccaacagatacttccagctcctgctctttgactgtttgcacaggttcccataacgatccaaaggatattgccggtttggcgcacctttgtgagcacatgattctttctgccggttccaaaaaataccctgatcctggtttattccacacattgatcgcaaaaaacaacggctctcaaaatgcctttaccacaggggagcaaacgactttttattttgaattgcccaatactcaaaataacggcgaatttacatttgaatctatcttagatgtgtttgcctctttcttcaaagaaccgctcttcaaccctttattgataagcaaggagatatatgcaatacaaagtgagcatgagggaaacatatcttccaccacaaaaatattctaccacgcagcaagaatattggccaatcccgaccatcctttcagtcgcttttccactgggaacatacactctttatctagcattccacaattgaaaaaaataaaattgaagagctctttaaacacttacttcgaaaataatttttttggggagaatataaccttgtgcataaggggaccgcagtctgttaatattcttacgaaattggctttatccaaatttggcgatataaaacccaaaagcgctgtaaaggaaaggagtatatctattaggacgaggtcttttagaagatccaagtctttaaaaaaacgccaagattcttccaaaaacgactacagtgacttgaaaacctttaaaatattaaacacaacgtgggaaaaaaaatacaaaaatacgatgtgttttcaacaatttcctgaatgcaattctatatttatcaatagtaataaggtacctataatgagacttctctttcctgttagcgataaaaacactagatttacaaaggatgacattaaaatatacagtcatctttggtgtgaacttttcggcgatgagtctccaggatctttgagctattacttagcttccaaaggctggctcacaggctgttttgcctttaccagtgaattcgctattggtgacataggattaattttggaattagaattaacaaacagtggctgggaaaatattaagagaattacgacaatagtacttaatagactcttgccttccttttacgtaatgaacatcgattacttaatcacttttttgaaagaacagaatttgatcgacctcgttagctttttgtaccaaagtagtgaggatcttccaatggaagagtgctccaaattaagcggtattcttcaggacgatttagaatgtttaaccccccctaatatattcaaaggatttaaatctcttatagaaatagatgatcccaacatcgaaaaatatgaaaacacaaaggccaatatacaatggtggacagggcaagctattaagttccaaaattttttaaaatctttcatgaatcatgacaacatgcgccttttactcttagggaatataaaatctggtaatatatttgataaaatgaaaaataaaagtgatatatgcaccgattttttctatgaatttgagtattatacggcaaacgttcatttagcaagtgataataaatttcattccaacagctcttatgaatttaattttcccacaggtaatctttttttaccagattgcgtcagcgatcctttaaaattacaacagctcttcttagaatgctctttaaaatctaaatttgctacgcttagacctcaaatttatagtgagcccactaggacaaagcctcaattagtcagtgagaaccagaattatgagatgtggatcttaaaagaagacccaaattttgccagtgacaataaatccgtcgtatcctttgaagttttggggttaggcatcaaacctagtccggaggcaacaatccacttggaagtattggcacaggcattatttatcatcacctcttctttcctttatcccgctttgagaattggttacacatatgagattgcctcttctagtaagggcaacgtaacattgagatttactatttctggattccctgagggtgttttcacaatagtaaagacgttcgtggatacgttgaaacttattgcaacagatccaacgtttctttctaaagataccttgagaaaggcaaggattttagttagaaataaatacaagaacgcgtcttctgacaactgcgtgaagttggctagcgttggattgttaattgttttagagaaatatatatggactttagaggatagaattaatgcattagagcttaccgagttggaatccttcgaaaaattttgttttttattctggaggaatcctaaacatttggtcttgttcatgcagggaagccttgaatatgctgacgcaatcaaccgttacttaaataacaattttacgcagcacttgaaaatcagcaatgaagggagcaaaccgaccatacgtctctaccctcctcccagtacaaaagatttggatcaaggcacaaatgcctttatatcttataatggtcaccaggatgatcccaacaatagtattgtgtattttattcagactgcacaaagagatgacatcaaaaatttgacattaacctttcttaccgaatatttattttctttgacgttagtgcctgatttgagaaataaaaagcaaattgggtacattgttttgggaggactcagggttttaacagacactgttgggattcatataaccgtaatgtctggcagcagtgggcacaatttggaaactaggatcaatgagtacttatcttacttgcagttacaggtgttgaatagattcaccgagtttgattttagaaggatacttttggagccgttcttaaatcttttaaaacagaacagtacgaaacagtttgaagggtctgctggtcctgtagacttattaaatgagatagtggcaaatgtgcaaaatggtgataattacactctcaacaataaacaaatgagacaacataggaaggtaagaaataaaattgcggaaggaaggcttaattttcaagaagatcatgaaatgattgatatctcttttttgcaaaaattaactttgaagaaatatttagcattcttcgagtccaaaatctctatatattccgctcaaagaagtaagttatctataatgatcacaagtccaatggcagagaaggaaattgcaagcaggaaaatgttccttcagttggaggcctttttgaaaataaacggattcgccataaaaaatgaagacttgaagaaaattgtcgaacattctaagggaaatcctattttacttgtaaagaacctttttacttattttcgtaggagaaatgaagttttcaagctcggaaccgttgtattgcaggaaatattgaaaatcatcggaatgaatcttaagcagagatacggctctatattagggttttcttcccaagatggtgaaggacaagaaatagaaaaattttggaacaacgacacaagtccgattgttcctcttcaggagcttcctgaaccaaactttttccgcaaggccgcattttga

SEQ ID NO: 11661 - DNA, 1221 bp, Saccharomyces cerevisiae
atggaaggtatgaatatgggtagcagcatgaatatggacgccatgtctagtgcatccaagacagtagcatcgagtatggcgtcgatgagcatggatgcgatgtctagtgccagcaaaacgatattatcgagcatgtcatcgatgagcatggaagcgatgtccagtgcgagcaaaacgttggcgtcgactatgtcgtcaatggcaagtatgtcgatgggaagcagttcaatgtcaggtatgtctatgtcgatgagcagtacaccaacaagctccgccagtgcacagacaacttctgattctagcatgtcaggcatgtcaggtatgtcatcgtctgataacagtagctcttcagggatggatatggacatgagtatgggaatgaactattatctgactcccacatataaaaactatccagttttgtttcaccatttgcatgcaaacaatagtggtaaggctttcggtattttcttattatttgttgtggctgctttcgtctacaaactactgcttttcgttagttggtgccttgaagttcactggtttaaaaaatgggacaagcaaaataaatattccactttaccttcagcaaactccaaagacgaaggaaaacattatgacacagagaataattttgaaattcaaggtttacctaagctgccaaatttattaagcgatatatttgttccatctttaatggatctctttcatgacattataagggcgttcttagtatttacctctacgatgattatttatatgttgatgcttgctaccatgtcttttgttttaacatacgtttttgctgtaattactgggttagctttatcggaagtcttcttcaatagatgcaaaatagccatgctaaagaggtgggacatccaaagagaaattcagaaagcgaagagctgtcctggcttcggtaactgccaatgtggtagacatcccgaacccagccctgatccaattgctgttgccgataccacttccggaagtgatcaaagtactcgcctggaaaagaacaacgaatctaaagttgcgatttccgaaaataatcaaaagaaaacacctacacaagaagagggatgtaattgtgccacagactcaggaaagaatcaagcaaacatagagcgcgacatccttgagaattccaagttgcaggaacagtccgggaatatggatcaaaacttacttccggccgaaaaattcactcataactaa

SEQ ID NO: 11662 - DNA, 1221 bp, Artificial Sequence
  Description of Artificial Sequence: Synthetic polynucleotide
atggaaggtatgaatatgggtagcagcatgaatatggacgccatgtctagtgcatccaagacagtagcaagtagtatggcgtccatgagcatggatgcgatgtctagtgccagcaaaacgatattatccagcatgtcttctatgagcatggaagcgatgtccagtgcgagcaaaacgttggcgtctactatgtcttctatggcaagtatgtccatgggaagcagttctatgagtggtatgtctatgtccatgagcagtacaccaacaagctccgccagtgcacagacaacttctgattctagcatgagtggcatgagtggtatgtcttcttctgataacagtagctcttctgggatggatatggacatgagtatgggaatgaactattatttgactcccacatataaaaactatccagttttgtttcaccatttgcatgcaaacaatagtggtaaggctttcggtattttcttattatttgttgtggctgctttcgtctacaaattattacttttcgttagttggtgccttgaagttcactggtttaaaaaatgggacaagcaaaataaatattccactttaccttctgcaaactccaaagacgaaggaaaacattatgacacagagaataattttgaaattcaaggtttacctaagttaccaaatttattaagcgatatatttgttccatctttaatggatctctttcatgacattataagggcgttcttagtatttacctctacgatgattatttatatgttgatgcttgctaccatgtcttttgttttaacatacgtttttgctgtaattactgggttagctttatctgaagtcttcttcaatagatgcaaaatagccatgttgaagaggtgggacatccaaagagaaattcagaaagcgaagagctgtcctggcttcggtaactgccaatgtggtagacatcccgaacccagccctgatccaattgctgttgccgataccacttccggaagtgatcaaagtactcgcttagaaaagaacaacgaatctaaagttgcgatttccgaaaataatcaaaagaaaacacctacacaagaagagggatgtaattgtgccacagactctggaaagaatcaagcaaacatagagcgcgacatccttgagaattccaagttgcaggaacagtccgggaatatggatcaaaacttacttccggccgaaaaattcactcataactga

SEQ ID NO: 11663 - DNA, 1365 bp, Saccharomyces cerevisiae
atgctgaaatacaggtctttgccaatcaagagagcaatccatcatccggcaccaggaattactccaatttctccccgtattatggtaagcaggttgagagtaataccatcttttaatttgaagttcaatcgttggaactcttcggtgccagaaagctcgaaaaaggagttaaaaacgacagacggaaaccaagaaagtgcgagtaaggtctctccagtaaaagagaaggaaaaagtaccctttaaggttaagatgcaaaaagcccttcgtcattattgggatggttccaaacttttggggttggagataaaaatttcttccaaattgctcatgaagagtgctgcaggctacccattgacgagaagagaaaatttacaactgaaaagaactactcaagatatcgttcggttggttccatttgctgctttcctcattataccctttgctgaacttcttcttccatttgcattaaagttattccccaatttacttccttctacttatgaatcaagtaaaaaacgcgagaataaactagaaaatttaagaaacacaaggaagttaatgtctgaaatcataaagaataacaagtcccattttaaacctaataatatttccgaggaacaaaaagctttgtttaacaggttctacacacatgtccgtgctacaggagtgccggagtctcgtcaacagctaatcgaagtagctagattattcactgatgatactgtattggataatgtgacaagaccttacttgattgcattagcgaagtatatgaatttgcaaccattcggcactgatgtgatgctacgttaccgtatcagatacaaaatgcttgaattgaaaaaagatgatctatctatatattacgaggatgcagaacaactctccctctctgaattgaaaacagcatgcgcctccagaggtattagaagtgtagacgtagagcctagcgtgttatattcgaatctaagattgtggctgaacatgaggctcaaggataagatcccatccacgctgttaatcatggctactgcctataactacggtaatgtgcaatcaaaggagtcattgtacgacgcattatgtgacgttttaatcggtatccctgatgaactataccatgaggttaaagtaaacgtcgttaaggaagatgaggcatccgctaagcaaaaattgaaacaattgagggagcaagaagaaattatgaaggaagaagagcagcaagaagagaacgccattgtgagcgtcaaggatgagttgagcttggacgaccaagacaagaacatagatgcggctgctccagacgtaaaaccgcatgacaccaagcctatcggagaagccgctgccatcaaagagaagtaa

SEQ ID NO: 11664 - DNA, 1365 bp, Artificial Sequence
  Description of Artificial Sequence: Synthetic polynucleotide
atgttgaaatacaggtctttgccaatcaagagagcaatccatcatccggcaccaggaattactccaatttctccccgtattatggtaagcaggttgagagtaataccatcttttaatttgaagttcaatcgttggaactcttctgtgccagaaagcagtaaaaaggagttaaaaacgacagacggaaaccaagaaagtgcgagtaaggtctctccagtaaaagagaaggaaaaagtaccctttaaggttaagatgcaaaaagcccttcgtcattattgggatggttccaaacttttggggttggagataaaaatttcttccaaattgctcatgaagagtgctgcaggctacccattgacgagaagagaaaatttacaattgaaaagaactactcaagatatcgttagattggttccatttgctgctttcctcattataccctttgctgaacttcttcttccatttgcattaaagttattccccaatttacttccttctacttatgaaagtagtaaaaaacgcgagaataaattagaaaatttaagaaacacaaggaagttaatgtctgaaatcataaagaataacaagtcccattttaaacctaataatatttccgaggaacaaaaagctttgtttaacaggttctacacacatgtccgtgctacaggagtgccggagtctcgtcaacagttaatcgaagtagctagattattcactgatgatactgtattggataatgtgacaagaccttacttgattgcattagcgaagtatatgaatttgcaaccattcggcactgatgtgatgcttcgttaccgtatcagatacaaaatgcttgaattgaaaaaagatgatttatctatatattacgaggatgcagaacaactctccctctctgaattgaaaacagcatgcgcctccagaggtattagaagtgtagacgtagagcctagcgtgttatattctaatttaagattgtggttgaacatgaggctcaaggataagatcccatccacgttattaatcatggctactgcctataactacggtaatgtgcaatccaaggagtctttgtacgacgcattatgtgacgttttaatcggtatccctgatgaattataccatgaggttaaagtaaacgtcgttaaggaagatgaggcatccgctaagcaaaaattgaaacaattgagggagcaagaagaaattatgaaggaagaagagcagcaagaagagaacgccattgtgagcgtcaaggatgagttgagcttggacgaccaagacaagaacatagatgcggctgctccagacgtaaaaccgcatgacaccaagcctatcggagaagccgctgccatcaaagagaagtga

SEQ ID NO: 11665 - DNA, 1038 bp, Saccharomyces cerevisiae
atgtctgtcgccgatttgaaaaacaacatccacaagttagatactggctatggtttaatgagtttgacttggagagccgagcctatccctcagtcgcaggctttcgaggccatgcacagagtggttgagttatccagagaacgtgggcacaaggcctttttcaacgttggtgaattctatggtcccgattttattaatttgtcgtatgttcacgacttctttgcgaaatacccagatttgagaaaggatgtggttatcagttgtaaaggtggtgcagacaatgctaccttaacccccagaggcagtcacgatgatgttgtacaaagcgtaaagaattcagttagtgctattggtggctacatcgacatcttcgaagtcgcaagaatcgacacttccctatgcacgaaaggagaggtctacccctacgaatcgttcgaagcgcttgctgagatgatctccgaaggcgttattggcggtatttcattaagtgaagttaatgaagagcaaattagagctattcacaaggattggggaaagtttttgacctgcgttgaagtggaactttctttgttcagtaatgacattttacacaacggaattgctaaaacatgtgctgaattggggttgtccatcatctgctactccccactgggcagaggattgttgacaggtcaattgaagtcaaacgctgatatccctgagggtgactttagaaagtcgttaaagagatttagcgacgagtctttgaaaaaaaacctgaccttggtcaggtttctacaggaagaaatagtcgacaagcgcccacaaaacaactccattactcttgcacaactggctttgggatgggttaagcactggaacaaagttccggaatacagtggcgccaaatttatcccaattccaagtggctcttctatttccaaggttaatgaaaactttgatgaacagaaaaccaaacttaccgatcaagagttcaatgccattaacaaatatttgactactttccatactgttggtgacagatacgaaatggcgtaa

SEQ ID NO: 11666 - DNA, 1038 bp, Artificial Sequence
  Description of Artificial Sequence: Synthetic polynucleotide
atgtctgtcgccgatttgaaaaacaacatccacaagttagatactggctatggtttaatgagtttgacttggagagccgagcctatccctcagtctcaggctttcgaggccatgcacagagtggttgagttatccagagaacgtgggcacaaggcctttttcaacgttggtgaattctatggtcccgattttattaatttgagttatgttcacgacttctttgcgaaatacccagatttgagaaaggatgtggttatcagttgtaaaggtggtgcagacaatgctaccttaacccccagaggcagtcacgatgatgttgtacaaagcgtaaagaattctgttagtgctattggtggctacatcgacatcttcgaagtcgcaagaatcgacacttccttatgcacgaaaggagaggtctacccctacgaatctttcgaagcgcttgctgagatgatctccgaaggcgttattggcggtatttctttaagtgaagttaatgaagagcaaattagagctattcacaaggattggggaaagtttttgacctgcgttgaagtggaactttctttgttcagtaatgacattttacacaacggaattgctaaaacatgtgctgaattggggttgtccatcatctgctactccccattaggcagaggattgttgacaggtcaattgaagtctaacgctgatatccctgagggtgactttagaaagtctttaaagagatttagcgacgagtctttgaaaaaaaacttgaccttggtcaggtttttgcaggaagaaatagtcgacaagcgcccacaaaacaactccattactcttgcacaattggctttgggatgggttaagcactggaacaaagttccggaatacagtggcgccaaatttatcccaattccaagtggctcttctatttccaaggttaatgaaaactttgatgaacagaaaaccaaacttaccgatcaagagttcaatgccattaacaaatatttgactactttccatactgttggtgacagatacgaaatggcgtga

SEQ ID NO: 11667 - DNA, 987 bp, Saccharomyces cerevisiae
atgttaactctagagtctgcattaactggcgctgtggcttcggcaatggccaatattgcagtttatccgctggatttatcgaagacgatcattcagtcacaagtatctccttcttcaagtgaggatagtaacgaaggtaaagttttgcccaataggagatataagaatgttgtagattgcatgataaacatattcaaagaaaagggtattttgggtctgtatcaaggtatgacagtcactacggtggccacatttgtccagaattttgtttatttcttttggtacacatttatcagaaagtcctacatgaaacataagctgttaggactgcaatcactgaaaaaccgcgatggtcctatcacaccttctacgattgaagaattggtacttggggtagcagctgccagtatatcgcaactttttactagtcccatggctgtggtagctacaagacaacaaacagtccattctgcagagtctgccaaatttaccaacgttattaaggacatttaccgtgaaaataatggggacataactgctttttggaaaggtttaagaacaggtttagcattgacgataaatccttccatcacatatgcctcttttcaaagacttaaagaagtttttttccatgaccattccaacgatgctggcagtttgtcagcagtgcaaaatttcattttgggtgtcctttccaagatgatttcgactctagttacgcaacccttgattgtcgctaaagcaatgcttcaaagcgctggctctaaattcactactttccaagaagcgctactatacttgtacaaaaatgaagggttaaaatctctttggaagggagttcttcctcaattgacaaagggtgtcattgtgcaaggtctgttgtttgctttcagaggagaattgacaaaatctttaaagaggctaatattcttgtactcttcttttttcctaaagcacaacggacaacgcaagctggcttccacttga

SEQ ID NO: 11668 - DNA, 987 bp, Artificial Sequence
  Description of Artificial Sequence: Synthetic polynucleotide
atgttaactttagagtctgcattaactggcgctgtggcttctgcaatggccaatattgcagtttatccgttagatttatccaagacgatcattcagtctcaagtatctccttcttccagtgaggatagtaacgaaggtaaagttttgcccaataggagatataagaatgttgtagattgcatgataaacatattcaaagaaaagggtattttgggtttatatcaaggtatgacagtcactacggtggccacatttgtccagaattttgtttatttcttttggtacacatttatcagaaagtcctacatgaaacataagcttttaggattacaaagtttgaaaaaccgcgatggtcctatcacaccttctacgattgaagaattggtacttggggtagcagctgccagtatatctcaactttttactagtcccatggctgtggtagctacaagacaacaaacagtccattctgcagagtctgccaaatttaccaacgttattaaggacatttaccgtgaaaataatggggacataactgctttttggaaaggtttaagaacaggtttagcattgacgataaatccttccatcacatatgcctcttttcaaagacttaaagaagtttttttccatgaccattccaacgatgctggcagtttgagtgcagtgcaaaatttcattttgggtgtcctttccaagatgatttctactttggttacgcaacccttgattgtcgctaaagcaatgcttcaaagcgctggctctaaattcactactttccaagaagcgttattgtacttgtacaaaaatgaagggttaaaatctctttggaagggagttcttcctcaattgacaaagggtgtcattgtgcaaggtttattgtttgctttcagaggagaattgacaaaatctttaaagaggttgatattcttgtactcttcttttttcttgaagcacaacggacaacgcaagttggcttccacttga

SEQ ID NO: 11669 - DNA, 1050 bp, Saccharomyces cerevisiae
atgtcgcagtacatcggtaaaactatttctttaatctctgtgactgacaacagatatgtggggctgttagaagatattgactctgaaaagggtaccgtgactttgaaagaagttcgctgttttggtacagaaggtcgcaagaactggggtcctgaagaaatttatccgaatcctacggtatacaattctgtaaagttcaacggcagtgaagtcaaggatttaagcattttagatgctaacatcaatgacatacagccggttgttcctcaaatgatgccacccgcttcacaattccctcctcaacaagctcaatctccaccccaggctcaagctcaagcacacgtgcaaacaaacccccaagttccaaagcccgaatccaatgtgccagcagctgtcgctggatatggtgtttacaccccaacttcgacagaaaccgctactgctagtatgaatgataagagcactcctcaagacaccaatgtaaactcgcaaagtagggaaagaggtaaaaatggtgaaaatgagccaaaatatcaaagaaacaagaatagatcaagtaatcgccctcctcaatccaaccgcaatttcaaagtcgatattccgaatgaagattttgactttcaatcaaataatgcaaaattcacgaaaggtgattccactgatgtggaaaaagaaaaagaattagaatcagctgttcacaagcaggatgaatctgatgagcagttttataataaaaaatcgtcttttttcgacaccatctccacttctactgaaactaataccaatatgagatggcaagaagaaaaaatgttgaacgttgacacctttggacaagcttctgccagaccaagatttcactctagaggcctcggtcgtgggcgtggaaattataggggaaacagaggaaacagaggaagaggcggccaacgtggaaactaccaaaacagaaataactaccaaaatgatagtggcgcctatcagaaccaaaacgactcgtacagcagaccagccaaccagttttcgcaacctccttccaacgttgaattttaa

SEQ ID NO: 11670 - DNA, 1050 bp, Artificial Sequence
  Description of Artificial Sequence: Synthetic polynucleotide
atgtctcagtacatcggtaaaactatttctttaatctctgtgactgacaacagatatgtggggttattagaagatattgactctgaaaagggtaccgtgactttgaaagaagttcgctgttttggtacagaaggtcgcaagaactggggtcctgaagaaatttatccgaatcctacggtatacaattctgtaaagttcaacggcagtgaagtcaaggatttaagcattttagatgctaacatcaatgacatacagccggttgttcctcaaatgatgccacccgcttctcaattccctcctcaacaagctcaatctccaccccaggctcaagctcaagcacacgtgcaaacaaacccccaagttccaaagcccgaatccaatgtgccagcagctgtcgctggatatggtgtttacaccccaacttctacagaaaccgctactgctagtatgaatgataagagcactcctcaagacaccaatgtaaactctcaaagtagggaaagaggtaaaaatggtgaaaatgagccaaaatatcaaagaaacaagaatagaagtagtaatcgccctcctcaatccaaccgcaatttcaaagtcgatattccgaatgaagattttgactttcaaagcaataatgcaaaattcacgaaaggtgattccactgatgtggaaaaagaaaaagaattagaatctgctgttcacaagcaggatgaatctgatgagcagttttataataaaaaatcttcttttttcgacaccatctccacttctactgaaactaataccaatatgagatggcaagaagaaaaaatgttgaacgttgacacctttggacaagcttctgccagaccaagatttcactctagaggcctcggtcgtgggcgtggaaattataggggaaacagaggaaacagaggaagaggcggccaacgtggaaactaccaaaacagaaataactaccaaaatgatagtggcgcctatcagaaccaaaacgactcttacagcagaccagccaaccagttttctcaacctccttccaacgttgaattttga

SEQ ID NO: 11671 - DNA, 588 bp, Saccharomyces cerevisiae
atgacaacaattcagccttttgaacctgtcgatttattcaaaactaacaatgtcaaccttgatatcttaacagaaaacttccctttagagttttattttgaatacatgataatatggccagacctttttttcaaaagttcagaaatgactgttgatcctacatttaagcataatatctctggttacatgatggcaaaaacagaaggcaagaccacggagtggcacactcatataactgcagtgacagtagctccaagattccgccgaatatcgctagcttcgaagttatgtaatactttggagaccatgaccgatgtcatgccccatgaagtcaactttatcgatcttttcgtcaagtgcaataaccaattggccatcaaactttacgaaaaattgggatacagtgtctacaggagagtggtgggatattataactcagctgaagatgggtatccagataccctgaaaaaagtagatgacaataaagatgcttttgatatgagaaaagctatggctagggacaggaacagaagcgtacggccggatggaagaagccataaatgctatccacatgatgtaagattttaa

SEQ ID NO: 11672 - DNA, 588 bp, Artificial Sequence
  Description of Artificial Sequence: Synthetic polynucleotide
atgacaacaattcagccttttgaacctgtcgatttattcaaaactaacaatgtcaaccttgatatcttaacagaaaacttccctttagagttttattttgaatacatgataatatggccagacctttttttcaaaagttctgaaatgactgttgatcctacatttaagcataatatctctggttacatgatggcaaaaacagaaggcaagaccacggagtggcacactcatataactgcagtgacagtagctccaagattccgcagaatatctttggcttccaagttatgtaatactttggagaccatgaccgatgtcatgccccatgaagtcaactttatcgatcttttcgtcaagtgcaataaccaattggccatcaaactttacgaaaaattgggatacagtgtctacaggagagtggtgggatattataactctgctgaagatgggtatccagataccttgaaaaaagtagatgacaataaagatgcttttgatatgagaaaagctatggctagggacaggaacagaagcgtaagaccggatggaagaagccataaatgctatccacatgatgtaagattttga

SEQ ID NO: 11673 - DNA, 438 bp, Saccharomyces cerevisiae
atgggtaaaggtaagccaagaggtttgaactccgctagaaagttgcgtgtccacagaagaaacaaccgttgggccgaaaacaactataagaagagattattgggtactgccttcaagtcttctccattcggtggttcttctcacgccaagggtattgtcttggaaaagttgggtatcgaatccaagcaacctaactctgctatcagaaagtgtgttagagttcaattaatcaagaacggtaagaaggttactgctttcgttccaaacgatggttgtttgaactttgtcgatgaaaatgacgaagtcttgctagccggtttcggtagaaagggtaaggctaagggtgatattccaggtgttagattcaaggtcgttaaggtctctggtgtctccttgttggctttgtggaaggaaaagaaggaaaagccaagatcttaa

SEQ ID NO: 11674 - DNA, 438 bp, Artificial Sequence
  Description of Artificial Sequence: Synthetic polynucleotide
atgggtaaaggtaagccaagaggtttgaactccgctagaaagttgcgtgtccacagaagaaacaaccgttgggccgaaaacaactataagaagagattattgggtactgccttcaagtcttctccattcggtggttcttctcacgccaagggtattgtcttggaaaagttgggtatcgaatccaagcaacctaactctgctatcagaaagtgtgttagagttcaattaatcaagaacggtaagaaggttactgctttcgttccaaacgatggttgtttgaactttgtcgatgaaaatgacgaagtcttgttagccggtttcggtagaaagggtaaggctaagggtgatattccaggtgttagattcaaggtcgttaaggtctctggtgtctccttgttggctttgtggaaggaaaagaaggaaaagccaagatcttga

SEQ ID NO: 11675 - DNA, 1233 bp, Saccharomyces cerevisiae
atgagtacagccgatcaagaacaacccaaagtggtggaagcgacaccagaagatgggacagcttcctcccaaaagtcaactataaacgctgagaatgaaaatacaaaacaaaatcaaagtatggaaccccaagaaacttcaaaaggtacctccaatgatactaaagacccagataacggagaaaagaacgaggaagccgcaatagacgaaaatagtaacgtagaagctgcagaaaggaaacgtaagcacattagcacagatttctcagatgacgacctagaaaaggaggagcataatgatcagagtcttcaaccaacggtggaaaatagggctagtaaagatagagattcaagtgctactccaagtagtagacaggaattggaagaaaaactggaccgtatattgaaaaaaccaaaggttagaagaacgaggagggatgaagacgatttagaacagtacttggatgaaaaaattctaaggcttaaagacgaaatgaatattgcagcacagttggacatcgatactttaaataagagaatagaaactggagatacttcgctgattgccatgcagaaggtcaaattgttgccgaaggtggtaagcgtactgtcaaaggcaaacttggcagacaccattttggataataacttacttcaaagtgtcagaatatggttggaacccttacctgatgggtctctgccatcttttgagattcaaaagtcactctttgcagctttaaacgatctaccagtgaaaactgaacacctgaaggagagtggtttggggagagtagttatcttttatacaaagtccaagcgtgtcgaagctcaactagctaggttggctgaaaaattaattgcggagtggacaagacctattattggtgcttcagataactacagagataagagaataatgcaattagagtttgattctgaaaaattgagaaagaaatccgttatggattctgccaaaaataggaaaaagaaatctaagtctggtgaagatcctacctctcgtggttcttcggtacaaaccttgtacgaacaagctgctgcaaggagaaacagggctgccgcaccagcacaaaccactactgattacaagtatgctcctgtgagtaaccttagcgcagtacctacaaacgcaagagcagttggtgttggttccactttaaacaatagtgagatgtacaagaggttgacttcaagattaaacaagaagcataaataa

SEQ ID NO: 11676 - DNA, 1233 bp, Artificial Sequence
  Description of Artificial Sequence: Synthetic polynucleotide
atgagtacagccgatcaagaacaacccaaagtggtggaagcgacaccagaagatgggacagcttcctcccaaaagtctactataaacgctgagaatgaaaatacaaaacaaaatcaaagtatggaaccccaagaaacttctaaaggtacctccaatgatactaaagacccagataacggagaaaagaacgaggaagccgcaatagacgaaaatagtaacgtagaagctgcagaaaggaaacgtaagcacattagcacagatttcagtgatgacgacttggaaaaggaggagcataatgatcagagtcttcaaccaacggtggaaaatagggctagtaaagatagagattctagtgctactccaagtagtagacaggaattggaagaaaaattagaccgtatattgaaaaaaccaaaggttagaagaacgaggagggatgaagacgatttagaacagtacttggatgaaaaaattttaaggcttaaagacgaaatgaatattgcagcacagttggacatcgatactttaaataagagaatagaaactggagatacttctttgattgccatgcagaaggtcaaattgttgccgaaggtggtaagcgtattatccaaggcaaacttggcagacaccattttggataataacttacttcaaagtgtcagaatatggttggaacccttacctgatgggtctttaccatcttttgagattcaaaagtctctctttgcagctttaaacgatttaccagtgaaaactgaacacttgaaggagagtggtttggggagagtagttatcttttatacaaagtccaagcgtgtcgaagctcaattggctaggttggctgaaaaattaattgcggagtggacaagacctattattggtgcttctgataactacagagataagagaataatgcaattagagtttgattctgaaaaattgagaaagaaatccgttatggattctgccaaaaataggaaaaagaaatctaagtctggtgaagatcctacctctcgtggttcttctgtacaaaccttgtacgaacaagctgctgcaaggagaaacagggctgccgcaccagcacaaaccactactgattacaagtatgctcctgtgagtaaccttagcgcagtacctacaaacgcaagagcagttggtgttggttccactttaaacaatagtgagatgtacaagaggttgacttccagattaaacaagaagcataaatga

SEQ ID NO: 11677 - DNA, 153 bp, Saccharomyces cerevisiae
atgtttggtctacctcaacaggaagtctccgaagaggagaaaagagctcatcaagaacaaactgagaaaaccttgaaacaggccgcttatgtggctgcgtttctttgggtttccccaatgatctggcatttggtgaaaaagcaatggaaataa

SEQ ID NO: 11678 - DNA, 153 bp, Artificial Sequence
  Description of Artificial Sequence: Synthetic polynucleotide
atgtttggtttgcctcaacaggaagtctccgaagaggagaaaagagctcatcaagaacaaactgagaaaaccttgaaacaggccgcttatgtggctgcgtttctttgggtttccccaatgatctggcatttggtgaaaaagcaatggaaatga

SEQ ID NO: 11679 - DNA, 807 bp, Saccharomyces cerevisiae
atgggtttacctgaagttaactttcttcgaaaaaactgcatacttgtggagttaaaattattctatcaaacagtatacccaccgaaggaactatattggaataaccgaataactgcagaattgagtacattctccaatattaagtatgcaaggccgactttcgcagtaaataatggcacatttcagagaacaagaccgaaattagacttggtactggcttcatctgatattcgtaagctggctacggttttatttaatttaaaagctctcataatgaatacgaagggtgaggaacccactctaaccacgatgactagtgtccaaacgaacgaagagaaaaatgataacctggaacagaaatattcaagtctgctagatagatggaatgggaaagtagaagtgcatgattctcctttccttcaactccaacgggacagcaaccttttgtttgctgagaggccggtacgttacgttagcactacagaaggtgaaggcgtggacatatctagtgaagagtttttcaggttagaggaagaacagtgccgaaggaattatgatgttttggtcgatgaacattctacaccatcagtcgggatgaaagacggccaatacggaccaaatataattcactttgaaccgtcgctgtaccacacatattcttctctaccaatgagtatgaaattttggttaaatggtctagaagacgacgaaacgacgatgatgaacattgatgagaagtcagccgaaaatctggatatattattacatggtttcaaaggattttcgaacaagcgcgttaaaggatga

SEQ ID NO: 11680 - DNA, 807 bp, Artificial Sequence
  Description of Artificial Sequence: Synthetic polynucleotide
atgggtttacctgaagttaactttcttagaaaaaactgcatacttgtggagttaaaattattctatcaaacagtatacccaccgaaggaattgtattggaataacagaataactgcagaattgagtacattctccaatattaagtatgcaaggccgactttcgcagtaaataatggcacatttcagagaacaagaccgaaattagacttggtattggcttcttctgatattcgtaagttggctacggttttatttaatttaaaagctctcataatgaatacgaagggtgaggaacccactttgaccacgatgactagtgtccaaacgaacgaagagaaaaatgataacttggaacagaaatattctagtttattagatagatggaatgggaaagtagaagtgcatgattctcctttccttcaactccaaagagacagcaaccttttgtttgctgagaggccggtacgttacgttagcactacagaaggtgaaggcgtggacatatctagtgaagagtttttcaggttagaggaagaacagtgcagaaggaattatgatgttttggtcgatgaacattctacaccaagtgtcgggatgaaagacggccaatacggaccaaatataattcactttgaaccgtccttgtaccacacatattcttctttaccaatgagtatgaaattttggttaaatggtttggaagacgacgaaacgacgatgatgaacattgatgagaagtctgccgaaaatttggatatattattacatggtttcaaaggattttccaacaagcgcgttaaaggatga

SEQ ID NO: 11681 - DNA, 2784 bp, Saccharomyces cerevisiae
atggtttcagttatagacaagcttgtttttgactttggtgggaaaactctggtctctctcgcaccagataataatactttgtgtgtagccaataaaaatggcttaaccaagattctgaagacaaataacccagaagaagagccagagactttagattcttccaaattggtctcgtctataaaatgctattcaaactcgcactttctgatgactacaatgcaaggtgatgctcttaggtataacatcgattctagtcaagaagaattattggctagatttgctttacccctacgtgactgctgtgttattcattcaggtaaaatggccgtatttggaggagacgacttagaactaatccttttggaattggacgatgaaacacacaaaaaacatgccattaaaatcgatgaacaagtttctcaaatttcttacaattcacagatgaatattttagcagtttcaatgataaatggtaaggtacaaattttttctctgacatctactattccaaacaaagttcatgagttaaatgattacatagtggccaattcatatgatgatacacacagagataagatactctcgaatatgatggatgatatagataaagacaatgataatgacctgagtgaaacggctgatccagatgagaacaatgtagctgatccagaattctgtgctgctaatagaatttgcacgagagtggcttggcatccgaagggtctgcattttgcgctaccatgtgcagatgatacagtaaaaatattctctataaagggatattccctacaaaagacgttgtccacaaatctctcatcaacaaaggctcatttcattgatttgcaatttgacccgttacgtggaacttacattgcggcagtagatttaaataataagttaacggtatggaattgggaaacttccgagatccactacaccagggaattcaaaagaaaaattactaatattgcctggaaaatccaagcggactcaaaaactctagaccttgttttaggtacctggtccggtagtatagccattgtccaaaatttggcagagtccgtagtatctaatatacctgaccaatctgttgctgaatcttcaactaaacatgggctttttgtagactccgaatctgacttggaaaacttagagggaaatgatgatataaacaaaagcgataagctattttcagatattactcaagaagcgaatgcggaagatgtgttcactcaaacacacgacggccccagtggattaagtgaaaagagaaaatacaacttcgaagatgaagaagactttattgatgatgacgatggtgctggttatattagtggcaaaaaaccacataatgaacattcttattcgagagtacacaagactcattcgtttccaatcagtttggcaaacacaggaaaatttcgttatatgcctttttctccagcgggaacaccttttggctttactgacaggcgttatttgacaatgaatgaagtgggctacgtatctactgtcaagaatagtgagcaatacagcataactgtctctttttttgatgttggacgttttagagaataccatttcgaggacttatttggctacgatttatgcttcctaaatgaaaaaggcactttatttggccaatccaaaactgggcagatacaatataggccacacgatagcatacattcaaactggaccaagattattcctttgcaagctggtgagagaataacaagtgtggcagccaccccggttcgcgttattgttggtacatcattaggctatttcagaagtttcaatcaattcggggttccatttgctgttgaaaagacatccccaattgtagcgcttactgctcagaattatagggttttttcagtacattattcgcagtttcatggcctttcatactctttatctgaattgggtacttctagtaaaaggtactataaaagagagtgtccacttccaatgagtttaccaaacattaattctgatatgaaaaaagacgcaaatcttgactactacaattttaatccgatgggcatcaaaagtttgttcttttcaagctacggagatccatgcatttttgggtccgacaacacgcttctattgttatcaaagtggagatcaccagaagaaagtaaatggctccctattctagatagcaacatggaaatatggaagatgtcaggagggaaggaaacgacagatatacatgtctggcccttggctttggcgtatgacacattgaattgtatcttagttaagggcaagcatatatggcccgagtttccccttccgttgccatccgaaatggagattagaatgccagtatttgttaagagtaaattactagaggaaaacaaagctatattaaataaaaagaacgaaattggagctgacaccgaagcggaagaaggggaagaagacaaagaaatacagattcctgtttctatggcggcggaagaagagtatctgcgcagcaaggttttgtcagagctgttgacagatacactcgaaaatgacggtgaaatgtacggcaacgaaaatgaggtattggcagcattgaacggtgcatatgataaggctttgttacgtttatttgcgtctgcatgctcagaccaaaatgttgaaaaggctctttcgcttgctcatgaattaaaacaagatagagcacttactgcagccgttaagatatcagaaagagctgagctgccctctctcgttaaaaaaattaataatataagggaagctagatatgaacagcaattgaaataa

SEQ ID NO: 11682 - DNA, 2784 bp, Artificial Sequence
  Description of Artificial Sequence: Synthetic polynucleotide
atggtttctgttatagacaagcttgtttttgactttggtgggaaaactttggtctctctcgcaccagataataatactttgtgtgtagccaataaaaatggcttaaccaagattttgaagacaaataacccagaagaagagccagagactttagattcttccaaattggtcagctctataaaatgctattccaactctcactttttgatgactacaatgcaaggtgatgctcttaggtataacatcgattctagtcaagaagaattattggctagatttgctttacccttacgtgactgctgtgttattcattctggtaaaatggccgtatttggaggagacgacttagaattgatccttttggaattggacgatgaaacacacaaaaaacatgccattaaaatcgatgaacaagtttctcaaatttcttacaattctcagatgaatattttagcagtttctatgataaatggtaaggtacaaattttttctttaacatctactattccaaacaaagttcatgagttaaatgattacatagtggccaattcttatgatgatacacacagagataagatactctctaatatgatggatgatatagataaagacaatgataatgacttgagtgaaacggctgatccagatgagaacaatgtagctgatccagaattctgtgctgctaatagaatttgcacgagagtggcttggcatccgaagggtttgcattttgcgttaccatgtgcagatgatacagtaaaaatattctctataaagggatattccttacaaaagacgttgtccacaaatctctcttctacaaaggctcatttcattgatttgcaatttgacccgttacgtggaacttacattgcggcagtagatttaaataataagttaacggtatggaattgggaaacttccgagatccactacaccagggaattcaaaagaaaaattactaatattgcctggaaaatccaagcggactctaaaactttggaccttgttttaggtacctggtccggtagtatagccattgtccaaaatttggcagagtccgtagtatctaatatacctgaccaatctgttgctgaatcttctactaaacatgggctttttgtagactccgaatctgacttggaaaacttagagggaaatgatgatataaacaaaagcgataagttattttctgatattactcaagaagcgaatgcggaagatgtgttcactcaaacacacgacggccccagtggattaagtgaaaagagaaaatacaacttcgaagatgaagaagactttattgatgatgacgatggtgctggttatattagtggcaaaaaaccacataatgaacattcttattctagagtacacaagactcattcttttccaatcagtttggcaaacacaggaaaatttcgttatatgcctttttctccagcgggaacaccttttggctttactgacaggcgttatttgacaatgaatgaagtgggctacgtatctactgtcaagaatagtgagcaatacagcataactgtctctttttttgatgttggacgttttagagaataccatttcgaggacttatttggctacgatttatgcttcttgaatgaaaaaggcactttatttggccaatccaaaactgggcagatacaatataggccacacgatagcatacattccaactggaccaagattattcctttgcaagctggtgagagaataacaagtgtggcagccaccccggttcgcgttattgttggtacaagtttaggctatttcagaagtttcaatcaattcggggttccatttgctgttgaaaagacatccccaattgtagcgcttactgctcagaattatagggtttttagcgtacattattctcagtttcatggcctttcttactctttatctgaattgggtacttctagtaaaaggtactataaaagagagtgtccacttccaatgagtttaccaaacattaattctgatatgaaaaaagacgcaaatcttgactactacaattttaatccgatgggcatcaaaagtttgttcttttctagctacggagatccatgcatttttgggtccgacaacacgcttttattgttatccaagtggagatctccagaagaaagtaaatggctccctattttagatagcaacatggaaatatggaagatgtctggagggaaggaaacgacagatatacatgtctggcccttggctttggcgtatgacacattgaattgtatcttagttaagggcaagcatatatggcccgagtttccccttccgttgccatccgaaatggagattagaatgccagtatttgttaagagtaaattattggaggaaaacaaagctatattaaataaaaagaacgaaattggagctgacaccgaagcggaagaaggggaagaagacaaagaaatacagattcctgtttctatggcggcggaagaagagtatttgcgcagcaaggttttgagtgagttattgacagatacactcgaaaatgacggtgaaatgtacggcaacgaaaatgaggtattggcagcattgaacggtgcatatgataaggctttgttacgtttatttgcgtctgcatgctctgaccaaaatgttgaaaaggctctttctcttgctcatgaattaaaacaagatagagcacttactgcagccgttaagatatctgaaagagctgagttgccctctctcgttaaaaaaattaataatataagggaagctagatatgaacagcaattgaaatga

SEQ ID NO: 11683 - DNA, 1722 bp, Saccharomyces cerevisiae
atgtcagatgttacccaacagaaaaagaggaaaagatccaaaggagaagttaatccatcaaaacccacagtagacgaagaaatcacagatccatcctcaaacgaagatgaacaactagaagtttcggatgaagaagacgcattggaatctgaagaagaattcgagggtgaaaatccagccgataaaagaaggaggcttgcaaagcaatatctggagaatctgaaaagcgaagctaatgacattttaactgataataggaacgctgaagaaaaagatttaaacaatctcaaggaaagaacaatcgacgagtacaacaattttgatgctggagatttggataaggatatcattgcgtccaggttaaaagaagacgttgctgaacagcaaggccgagtcttcagatattttggcgataaacttctaatatctgaagcaaaacagagctttaccagggtaggggaaaataaccttacttgcattagttgtttccaacccgttttaaacaaatacaccttcgaggaatcatctaatggcgataagaacaaaggtaggttatttgcctatacagttagcaaagacttacaactcaccaaatatgacattactgactttagcaaaagaccaaagaagctaaaatacgctaaaggaggagcaaaatatatacctacgagcaagcacgaatatgagaataccacagaaggccattatgacgaaatcttaactgtagcagcctcaccagatggtaaatatgttgtcacaggtggaagagataggaagttaattgtatggagcacagaatctctatcacccgttaaagttattccaacaaaggatcgccgaggggaagttttatcgttggcttttagaaaaaattctgatcagttatatgcatcctgcgcagattttaagataagaacatattcaataaatcaattttcccagttggagattctttatgggcatcatgatatagtggaagatatatctgcgttggcgatggaaaggtgtgttaccgttggtgcccgtgatagaacagctatgctttggaagattcctgacgagaccagactaacatttagaggtggcgatgaacctcaaaagctactaaggagatggatgaaagaaaacgctaaggagggagaagatggagaagtcaaatatcctgatgaatcagaggcacctttatttttctgcgagggtagtattgacgttgtgagtatggtggatgattttcactttataacaggctccgataatggtaatatatgtctatggtctctggcgaagaagaaacctatcttcacggaaagaattgcccatggtattttacctgagccctctttcaatgacatttcgggggaaaccgatgaagaattaagaaaaagacagttgcaaggcaagaaattgctacaaccattttggatcacatctctttacgctattccatattcgaatgtattcatatctggatcatggagtggatcgctaaaagtttggaaaattagtgataatctcagatcatttgagttgctaggtgaattatctggcgctaaaggtgtagttaccaagattcaggttgtagaaagtggtaaacatgggaaggagaagttccgtattttggctagtattgccaaagaacacagactcggtagatggattgcaaatgtttcaggtgccagaaatggtatatattcagctgtcattgaccaaacaggcttttag

SEQ ID NO: 11684 - DNA, 1722 bp, Artificial Sequence
  Description of Artificial Sequence: Synthetic polynucleotide
atgagtgatgttacccaacagaaaaagaggaaaagatccaaaggagaagttaatccatctaaacccacagtagacgaagaaatcacagatccatccagtaacgaagatgaacaattggaagtttctgatgaagaagacgcattggaatctgaagaagaattcgagggtgaaaatccagccgataaaagaaggaggcttgcaaagcaatatttggagaatttgaaaagcgaagctaatgacattttaactgataataggaacgctgaagaaaaagatttaaacaatctcaaggaaagaacaatcgacgagtacaacaattttgatgctggagatttggataaggatatcattgcgtccaggttaaaagaagacgttgctgaacagcaaggcagagtcttcagatattttggcgataaacttttgatatctgaagcaaaacagagctttaccagggtaggggaaaataaccttacttgcattagttgtttccaacccgttttaaacaaatacaccttcgaggaaagctctaatggcgataagaacaaaggtaggttatttgcctatacagttagcaaagacttacaactcaccaaatatgacattactgactttagcaaaagaccaaagaagttgaaatacgctaaaggaggagcaaaatatatacctacgagcaagcacgaatatgagaataccacagaaggccattatgacgaaatcttaactgtagcagcctctccagatggtaaatatgttgtcacaggtggaagagataggaagttaattgtatggagcacagaatctttatctcccgttaaagttattccaacaaaggatcgccgtggggaagttttatctttggcttttagaaaaaattctgatcagttatatgcatcctgcgcagattttaagataagaacatattctataaatcaattttcccagttggagattctttatgggcatcatgatatagtggaagatatatctgcgttggcgatggaaaggtgtgttaccgttggtgcccgtgatagaacagctatgctttggaagattcctgacgagaccagattgacatttagaggtggcgatgaacctcaaaagttattgaggagatggatgaaagaaaacgctaaggagggagaagatggagaagtcaaatatcctgatgaaagtgaggcacctttatttttctgcgagggtagtattgacgttgtgagtatggtggatgattttcactttataacaggctccgataatggtaatatatgtttatggtctttagcgaagaagaaacctatcttcacggaaagaattgcccatggtattttacctgagccctctttcaatgacatttctggggaaaccgatgaagaattaagaaaaagacagttgcaaggcaagaaattgttgcaaccattttggatcacatctctttacgctattccatattctaatgtattcatatctggatcttggagtggatctttgaaagtttggaaaattagtgataatctcagatcttttgagttgttgggtgaattatctggcgctaaaggtgtagttaccaagattcaggttgtagaaagtggtaaacatgggaaggagaagttccgtattttggctagtattgccaaagaacacagactcggtagatggattgcaaatgtttctggtgccagaaatggtatatattctgctgtcattgaccaaacaggcttttga

SEQ ID NO: 11685 - DNA, 1470 bp, Saccharomyces cerevisiae
atggctcggggtgacggacatctatggacagagacatatgatagttccacagtcgcttttatgattttaggtgccgccctggttttcttcatggtaccggggctgggctttctttattccggtttagcaagaagaaaatctgctctggctttgatttgggtagtgataatggctaccttagtaggtatactgcaatggtatttttggggctattctttagcattctctaagactgcgacgaacaacaaatttatcggcaacttggattcatttgggtttagaaacgtctatggcaaaatttcggatgattccacgtatcctgaactgatttatgccattttccaaatgatgttcatgtgtgtcgcattgagtattatagctggtgccactgcggaaagaggtaagctttttccacatatggtttttctttttgtttttgcgactttggtttactgtcccatcacttattggatttgggccccaggtggttgggcctaccaatggggggtattagactgggctggcggtgggaatattgaaatcctaagtgctgtggctggtttcgtttattcttattttctaggaagaagaaaagaaaacctcctgatcaactttagaccacataatgtttccatggtgactttgggtacttctatactttggtttggttggttgcttttcaatgctgcaagctcactgtcaccaaatatgaggtccgtatatgcgttcatgaacacttgtctcagcgccaccacgggtggaatgacgtggtgtttattagattatcgatctgaaaaaaaatggtccactgttgggttatgctccggcattatctgtggtttagttgctgccacgcctagctcgggttgtattactctatatggctctttgatccaaggtataatagcgggtgttgtttgtaattttgcaacaaaaataaagtattatttaaaagtggatgattccttagatctattagctgaacacggtatcgccggtgtggtgggattgatttttaacgctctatttgcagctgattgggttattggaatggacggcacaacaaagcataagggtggttggttgacgcataactggaaacaaatgtatattcaaattgcctatatcggtgcctctgccggctattgtgctgtggtcacggccatcatttgcttcgtattaggtaaaattccgggtgtccatctaagagtcactgaggaagccgaagcattggggttggatgaagatcaaataggcgaattcgcttacgattacgtggaggttaggagagattattaccagtggggtgtagatacagatgcacttcatactacatgcaatggcgctaattctgcgtctgagacaaatcctactgaggacagccaaaactcctcattgtcatcagctacagtaagcggccaaaacgaaaaaagtaataatcctaaattgcatcacgcaaaagaagcatga

SEQ ID NO: 11686 - DNA, 1470 bp, Artificial Sequence
  Description of Artificial Sequence: Synthetic polynucleotide
atggctagaggtgacggacatctttggacagagacatatgatagttccacagtcgcttttatgattttaggtgccgccttagttttcttcatggtaccggggttgggctttctttattccggtttagcaagaagaaaatctgctttggctttgatttgggtagtgataatggctaccttagtaggtatattgcaatggtatttttggggctattctttagcattctctaagactgcgacgaacaacaaatttatcggcaacttggattcttttgggtttagaaacgtctatggcaaaatttctgatgattccacgtatcctgaattgatttatgccattttccaaatgatgttcatgtgtgtcgcattgagtattatagctggtgccactgcggaaagaggtaagctttttccacatatggtttttctttttgtttttgcgactttggtttactgtcccatcacttattggatttgggccccaggtggttgggcctaccaatggggggtattagactgggctggcggtgggaatattgaaatcttaagtgctgtggctggtttcgtttattcttattttttgggaagaagaaaagaaaacctcttgatcaactttagaccacataatgtttccatggtgactttgggtacttctatactttggtttggttggttgcttttcaatgctgcaagcagtttatctccaaatatgaggtccgtatatgcgttcatgaacacttgtctcagcgccaccacgggtggaatgacgtggtgtttattagattatagatctgaaaaaaaatggtccactgttgggttatgctccggcattatctgtggtttagttgctgccacgcctagcagtggttgtattactttatatggctctttgatccaaggtataatagcgggtgttgtttgtaattttgcaacaaaaataaagtattatttaaaagtggatgattccttagatttattagctgaacacggtatcgccggtgtggtgggattgatttttaacgctttgtttgcagctgattgggttattggaatggacggcacaacaaagcataagggtggttggttgacgcataactggaaacaaatgtatattcaaattgcctatatcggtgcctctgccggctattgtgctgtggtcacggccatcatttgcttcgtattaggtaaaattccgggtgtccatttaagagtcactgaggaagccgaagcattggggttggatgaagatcaaataggcgaattcgcttacgattacgtggaggttaggagagattattaccagtggggtgtagatacagatgcacttcatactacatgcaatggcgctaattctgcgtctgagacaaatcctactgaggacagccaaaactcctctttgagttctgctacagtaagcggccaaaacgaaaaaagtaataatcctaaattgcatcacgcaaaagaagcatga

SEQ ID NO: 11687 - DNA, 903 bp, Saccharomyces cerevisiae
atggaaaagtacaccaattggagagacaatggtacgggaatagctccatttctaccaaacacaatcaggaaacctagtaaggtgatgacagcgtgtttgttgggtatcctaggggtgaaaaccattataatgctaccattgattatgctgtaccttctaactggccagaacaacttactgggtttgatattgaagtttacattcagttggaaagaggaaattaccgtgcaaggaatcaagaaacgtgacgtaaggaaatccaagcattatccacagaagggcaagctttatatttgcaattgtacctcacctttagatgctttttcagtggtgttattagctcaagggcctgttacgttgttggtcccatccaatgacattgtatacaaagtttccataagagaattcatcaacttcatcctcgccggtgggttagatataaaactctatggccacgaggtagcagagctatctcaattgggcaataccgtgaattttatgtttgctgagggtacctcatgtaatggtaaaagcgtcttaccgtttagtataaccgggaaaaaacttaaagaattcatagacccttcaataaccacaatgaaccccgcaatggccaaaactaaaaaatttgaattgcagaccatccaaatcaaaactaataaaactgccatcaccacattgcccatctccaatatggagtatttatctagatttctgaacaagggcattaatgttaaatgcaagatcaacgagccacaagtactctcggataatttagaggaattacgcgttgcattaaacggtggcgacaaatataaactagtctcacggaagttagatgttgaatctaagaggaattttgtgaaggaatatatcagcgatcaacgtaaaaagaggaagtag

SEQ ID NO: 11688 - DNA, 903 bp, Artificial Sequence
  Description of Artificial Sequence: Synthetic polynucleotide
atggaaaagtacaccaattggagagacaatggtacgggaatagctccatttttaccaaacacaatcaggaaacctagtaaggtgatgacagcgtgtttgttgggtatcttgggggtgaaaaccattataatgcttccattgattatgctttaccttttgactggccagaacaacttattgggtttgatattgaagtttacattcagttggaaagaggaaattaccgtgcaaggaatcaagaaacgtgacgtaaggaaatccaagcattatccacagaagggcaagctttatatttgcaattgtacctctcctttagatgctttttctgtggtgttattagctcaagggcctgttacgttgttggtcccatccaatgacattgtatacaaagtttccataagagaattcatcaacttcatcctcgccggtgggttagatataaaactctatggccacgaggtagcagagctttctcaattgggcaataccgtgaattttatgtttgctgagggtacctcttgtaatggtaaaagcgtcttaccgtttagtataaccgggaaaaaacttaaagaattcatagacccttccataaccacaatgaaccccgcaatggccaaaactaaaaaatttgaattgcagaccatccaaatcaaaactaataaaactgccatcaccacattgcccatctccaatatggagtatttatctagatttttgaacaagggcattaatgttaaatgcaagatcaacgagccacaagtactctctgataatttagaggaattacgcgttgcattaaacggtggcgacaaatataaattggtctctagaaagttagatgttgaatctaagaggaattttgtgaaggaatatatcagcgatcaacgtaaaaagaggaagtga

SEQ ID NO: 11689 - DNA, 1146 bp, Saccharomyces cerevisiae
atgtcttttagggatgtcctagaaagaggagatgaatttttagaagcctatcccagaagaagccccctttggagatttctttcatacagtacatcattactgaccttcggtgtatcaaaactgcttcttttcacatgctataatgtcaaattgaatggttttgaaaaattagaaactgccttggaacgttccaaaagggaaaatagaggccttatgacggtcatgaaccatatgagtatggtcgatgatccgttagtttgggcaacactaccatataagttatttacgtctttggacaacataagatggtctttgggtgcacataatatttgctttcaaaataaatttctggccaactttttctcacttggccaagtcctttcaacagaaagatttggggtgggcccatttcaaggttctatagatgcttcaataagattgttaagccctgacgacactttagacttggaatggacccctcactctgaggtctcttcttcgctaaaaaaagcctactccccgcccataataaggtcgaagccatcttgggtccatgtttatccagaaggatttgtactacaattatatccgccttttgaaaattcgatgaggtattttaaatggggtattaccagaatgatcctagaagcaacaaagccgcccattgtagtaccaatatttgctacagggtttgaaaaaatagcatccgaagcagtcacagattcaatgtttagacaaattctaccaagaaactttggctctgaaataaatgttaccataggggatcctttaaatgatgatttaatcgacaggtatagaaaagaatggacacatttggttgaaaaatactatgatcccaaaaatcctaacgacctctctgacgaattgaaatatggtaaagaggcgcaagatttaagaagcagattagccgctgaactgagagcccatgttgctgaaattagaaatgaagttcgcaaattaccacgcgaagaccctaggttcaaatccccctcatggtggaagcggttcaacaccacggaaggtaaatcggacccagatgttaaagtcattggcgaaaattgggcaataaggaggatgcaaaagtttctgcctccagagggtaaaccaaagggtaaggatgattga

SEQ ID NO: 11690 - DNA, 1146 bp, Artificial Sequence
  Description of Artificial Sequence: Synthetic polynucleotide
atgtcttttagggatgtcttggaaagaggagatgaatttttagaagcctatcccagaagaagccccctttggagatttctttcttacagtacaagtttattaaccttcggtgtatccaaattacttcttttcacatgctataatgtcaaattgaatggttttgaaaaattagaaactgccttggaacgttccaaaagggaaaatagaggccttatgacggtcatgaaccatatgagtatggtcgatgatccgttagtttgggcaacattaccatataagttatttacgtctttggacaacataagatggtctttgggtgcacataatatttgctttcaaaataaatttttggccaactttttctctcttggccaagtcctttctacagaaagatttggggtgggcccatttcaaggttctatagatgcttctataagattgttaagccctgacgacactttagacttggaatggacccctcactctgaggtctcttcttctttgaaaaaagcctactccccgcccataataaggtctaagccatcttgggtccatgtttatccagaaggatttgtattacaattatatccgccttttgaaaattctatgaggtattttaaatggggtattaccagaatgatcttggaagcaacaaagccgcccattgtagtaccaatatttgctacagggtttgaaaaaatagcatccgaagcagtcacagattctatgtttagacaaattttaccaagaaactttggctctgaaataaatgttaccataggggatcctttaaatgatgatttaatcgacaggtatagaaaagaatggacacatttggttgaaaaatactatgatcccaaaaatcctaacgacctctctgacgaattgaaatatggtaaagaggcgcaagatttaagaagcagattagccgctgaattgagagcccatgttgctgaaattagaaatgaagttcgcaaattaccacgcgaagaccctaggttcaaatcccccagctggtggaagagattcaacaccacggaaggtaaaagtgacccagatgttaaagtcattggcgaaaattgggcaataaggaggatgcaaaagtttttacctccagagggtaaaccaaagggtaaggatgattga

SEQ ID NO: 11691 - DNA, 2190 bp, Saccharomyces cerevisiae
atggaatcacttccacgtactcccacaaaaggcagatctacgcagcatctctcgacaccatcgccgaagaatgatattttagctatgaatggccacaaaagaagaaatacaacaactccaccgcctaagcacactcttctgaagccgcaacgtacggatattcatagacactcattagctagtcagagtcgcatatccatgtcacctaatcgcgagcttttaaagaattataaaggtacagcaaatttgatttatggaaaccagaaaagcaactccggtgtaacttccttttataaagaaaatgttaatgaactcaatagaacacaagcaatcttatttgagaaaaaggcaacactagatttactcaaagatgaactaacagaaacgaaagagaaaatcaatgccgttaatctcaaatttgaaacccttcgtgaagaaaagataaaaattgaacagcaactgaatttgaaaaacaatgaacttatctcgattaaagaagaatttttgtcaaagaagcagttcatgaatgaaggacatgaaatacatttaaagcagctagcggcatctaataaaaaagagctgaaacaaatggaaaatgaatacaaaacaaaaattgagaaattgaaatttatgaagattaaacagtttgaaaatgaaagagcgtcgcttttagataaaatagaagaggtaagaaataaaatcaccatgaacccttccactttacaggaaatgttgaacgatgttgaacaaaagcatatgcttgaaaaagaagaatggcttacagagtaccaatcgcagtggaaaaaggatatagagctgaataataaacatatgcaagaaatcgaaagcataaaaaaggaaatcgaaaatacattaaaacctgagttggcagaaaaaaagaagctcttaacagaaaagcgtaacgcgtatgaagctatcaaagtaaaagttaaagaaaaggaagaggaaactacaaggctgagagatgaggtggcattaaaacagaaaactaatttagaaactttggaaaagatcaaagaacttgaggaatatataaaagacactgaactgggtatgaaggagttgaatgaaattctgattaaagaggaaacggttagacgcacattgcataatgagttacaagagttaagaggaaatatacgagtttattgtaggattcgtccagctctaaaaaatttggaaaattctgatactagccttattaatgttaatgaatttgatgacaatagtggtgttcaatctatggaagtgacgaaaatacaaaacacagcgcaagtgcatgaattcaaatttgataaaatatttgatcaacaggatacaaatgtggatgtttttaaagaagttggtcagttagtgcaaagttcattagatggatataatgtttgtatcttcgcatacggacaaacaggatctgggaaaactttcacgatgttaaatccaggtgatggtatcattccgtccacaatatctcatatatttaactggatcaataaattaaagacaaaaggatgggattataaagttaactgcgaattcattgagatctacaacgagaacatcgtagacttattgagaagtgataataataataaagaagacacaagcattggcttaaagcacgaaatacgtcatgatcaggaaactaagactaccacgataacgaatgttacgagttgcaagcttgagtcggaagaaatggtggaaataatcctgaaaaaagcaaataaattaagatccaccgctagcacagcatcaaatgagcattcctcccgttcacacagtattttcataattcatttgtctggatcaaatgcaaaaactggagcacactcgtatggcacactaaatcttgttgatttggccggttccgaaagaataaatgtctctcaagttgtaggggatagattaagagaaacacaaaatataaataaatctttaagttgcttaggtgacgttattcatgctttaggtcagcctgatagtaccaaaagacatataccgttcaggaactcaaaactgacatacctactgcaatattcactcactggggattcgaaaacattaatgtttgtaaacatttcaccaagctcctctcatattaatgagactctcaattcgttaagatttgcgtctaaagtgaattctaccagattggttagtagaaaatga

SEQ ID NO: 11692 - DNA, 2190 bp, Artificial Sequence
  Description of Artificial Sequence: Synthetic polynucleotide
atggaatctcttccacgtactcccacaaaaggcagatctacgcagcatctctccacaccatctccgaagaatgatattttagctatgaatggccacaaaagaagaaatacaacaactccaccgcctaagcacactcttttgaagccgcaacgtacggatattcatagacactctttagctagtcagagtcgcatatccatgtctcctaatcgcgagcttttaaagaattataaaggtacagcaaatttgatttatggaaaccagaaaagcaactccggtgtaacttccttttataaagaaaatgttaatgaactcaatagaacacaagcaatcttatttgagaaaaaggcaacattagatttactcaaagatgaattaacagaaacgaaagagaaaatcaatgccgttaatctcaaatttgaaacccttcgtgaagaaaagataaaaattgaacagcaattgaatttgaaaaacaatgaacttatctctattaaagaagaatttttgtccaagaagcagttcatgaatgaaggacatgaaatacatttaaagcagcttgcggcatctaataaaaaagagttgaaacaaatggaaaatgaatacaaaacaaaaattgagaaattgaaatttatgaagattaaacagtttgaaaatgaaagagcgtcccttttagataaaatagaagaggtaagaaataaaatcaccatgaacccttccactttacaggaaatgttgaacgatgttgaacaaaagcatatgcttgaaaaagaagaatggcttacagagtaccaatctcagtggaaaaaggatatagagttgaataataaacatatgcaagaaatcgaaagcataaaaaaggaaatcgaaaatacattaaaacctgagttggcagaaaaaaagaagctcttaacagaaaagcgtaacgcgtatgaagctatcaaagtaaaagttaaagaaaaggaagaggaaactacaaggttaagagatgaggtggcattaaaacagaaaactaatttagaaactttggaaaagatcaaagaacttgaggaatatataaaagacactgaattgggtatgaaggagttgaatgaaattttaattaaagaggaaacggttagacgcacattgcataatgagttacaagagttaagaggaaatataagagtttattgtaggattcgtccagctttgaaaaatttggaaaattctgatactagccttattaatgttaatgaatttgatgacaatagtggtgttcaatctatggaagtgacgaaaatacaaaacacagcgcaagtgcatgaattcaaatttgataaaatatttgatcaacaggatacaaatgtggatgtttttaaagaagttggtcagttagtgcaaagttctttagatggatataatgtttgtatcttcgcatacggacaaacaggatctgggaaaactttcacgatgttaaatccaggtgatggtatcattccgtccacaatatctcatatatttaactggatcaataaattaaagacaaaaggatgggattataaagttaactgcgaattcattgagatctacaacgagaacatcgtagacttattgagaagtgataataataataaagaagacacaagcattggcttaaagcacgaaatacgtcatgatcaggaaactaagactaccacgataacgaatgttacgagttgcaagcttgagagtgaagaaatggtggaaataatcttgaaaaaagcaaataaattaagatccaccgctagcacagcatctaatgagcattcctcccgttctcacagtattttcataattcatttgtctggaagtaatgcaaaaactggagcacactcctatggcacattaaatcttgttgatttggccggttccgaaagaataaatgtctctcaagttgtaggggatagattaagagaaacacaaaatataaataaatctttaagttgcttaggtgacgttattcatgctttaggtcagcctgatagtaccaaaagacatataccgttcaggaactccaaattaacatacttgttgcaatattccctcactggggattctaaaacattaatgtttgtaaacatttctccaagctcctctcatattaatgagactctcaattctttaagatttgcgtctaaagtgaattctaccagattggttagtagaaaatga

SEQ ID NO: 11693 - DNA, 753 bp, Saccharomyces cerevisiae
atgggctccaagcacagagtagacactaaggataagaaaagaaccagaaagaatgcagaatttgggcgtgaaaaaaggaatagtggcaaccaagagttaagtaatgagccggaaaaagatacaataatggaaggtgatgaagccgaagaagacgagcagaatagctctagcgatgaatcatctaaaattatagataacgaacaaagtgatgctgaagaagatgatgatgaagaagaagaggacgacgacttcccaagaaagaaaaaatcgaaaaacagcaaacatgatgatggttctactggattttctgctgcagtaaatgctattttatcatcacatctgaaagcatacgacaggaaggaccccatcatggctagaaacaaaaaggtgctgaagcaaagtgagtcagaaaagctagaatacaaggccaaaaaagcattgttggcagaaaaaaaaaagttattaggtaaagccagaaagacggatattattccaattgcttccggagaagacaggtcagaaaatattagaaaagtccttgagaaggagacagcgctcagaaagatagctcaaaaaggtgccgtgaaattatttaacgccattttagcaactcaagtcaagacagaaaaggaagtatccgaaaatttaagcgaaattaagaataaagaagaaaagaaagaattgatcactgaagtttccaaagaaaaatttttggatttagttaaagctgccgcaggaagcgacaatgaataa

SEQ ID NO: 11694 - DNA, 753 bp, Artificial Sequence
  Description of Artificial Sequence: Synthetic polynucleotide
atgggctccaagcacagagtagacactaaggataagaaaagaaccagaaagaatgcagaatttgggcgtgaaaaaaggaatagtggcaaccaagagttaagtaatgagccggaaaaagatacaataatggaaggtgatgaagccgaagaagacgagcagaatagctctagcgatgaaagctctaaaattatagataacgaacaaagtgatgctgaagaagatgatgatgaagaagaagaggacgacgacttcccaagaaagaaaaaatctaaaaacagcaaacatgatgatggttctactggattttctgctgcagtaaatgctattttatcttctcatttgaaagcatacgacaggaaggaccccatcatggctagaaacaaaaaggtgttgaagcaaagtgagagtgaaaagttggaatacaaggccaaaaaagcattgttggcagaaaaaaaaaagttattaggtaaagccagaaagacggatattattccaattgcttccggagaagacaggtctgaaaatattagaaaagtccttgagaaggagacagcgctcagaaagatagctcaaaaaggtgccgtgaaattatttaacgccattttagcaactcaagtcaagacagaaaaggaagtatccgaaaatttaagcgaaattaagaataaagaagaaaagaaagaattgatcactgaagtttccaaagaaaaatttttggatttagttaaagctgccgcaggaagcgacaatgaatga

SEQ ID NO: 11695 - DNA, 1659 bp, Saccharomyces cerevisiae
atggtattgcttatatcagaaattaaagatattgccaagaggctgactgctgcgggtgacagaaagcagtacaactccattatcaagttaatcaatgaactagtgattccagaaaatgttactcaattggaagaagatgagacagaaaaaaatttgagatttctggttatgtcgctattccagatatttagaaagctgttttcccgcggcgacttgacccttccttcgtccaaaaagagcacattagagaaggaacagtttgttaattggtgtagaaaggtgtatgaagcgttcaagacgaagctgttagctatcatttcggacatacctttcgaaacatcacttgggttagattcgcttgatgtctatcttcaacttgcagagctggaatcaactcattttgcatctgaaaagggcgcaccatttttccccaataaaacattcagaaagttaatcatcgccctatggtcctcgaacatgggtgaaatagaggatgtcaaaagctcgggtgcgtctgaaaatttaatcatagtagaattcacggaaaaatattatacgaaatttgcagatattcaatactactttcaatcagaatttaaccaactattagaggatccagcctaccaggacttgcttttgaaaaacgttggtaaatggttagctttagtaaatcatgacaaacattgctctagtgttgatgcagatttagagatctttgtaccaaatcccccacaagccatagagaacgagtccaaattcaagtccaatttcgagaaaaattggttatcccttttaaacggccaattgtctttacagcagtataagtctattctgttaattttgcataagagaataatacctcatttccacactccaactaaactaatggatttccttactgattcctacaatttgcaaagctctaataaaaacgccggtgttgttccgatcttggctctgaatggcctttttgaattgatgaaaagattcaacttggaatatccaaatttttatatgaaactttatcaaattataaatccagacttaatgcatgttaaatacagagcaagatttttcaggttaatggacgtatttttgtcatcaacacatttatccgcccatttagtagcatctttcatcaaaaagctagccagactcaccctagaatcaccaccctctgctattgtcaccgtgattcccttcatctataatttaatcaggaaacatccgaattgtatgattatgctgcacaacccagccttcatttccaacccattccagacacctgaccaagtggcgaacttgaaaactctgaaagaaaactatgtagatcccttcgatgttcatgaatcggaccctgagttaactcatgcactggattcctctctgtgggagctggcgtcattgatggaacattatcatcctaatgtagccacgttggcgaagatatttgctcaaccatttaagaagctaagttataacatggaagatttcttagactggaactatgattctttgctcaatgcagaatcttcaagaaagttgaagacacttcctacgttagaatttgaggctttcacaaacgtttttgataatgaagacggcgatagcgaagcgtcatcccaaggtaacgtctacttgcctggggtagcatggtga

SEQ ID NO: 11696 - DNA, 1659 bp, Artificial Sequence
  Description of Artificial Sequence: Synthetic polynucleotide
atggtattgcttatatctgaaattaaagatattgccaagaggttaactgctgcgggtgacagaaagcagtacaactccattatcaagttaatcaatgaattagtgattccagaaaatgttactcaattggaagaagatgagacagaaaaaaatttgagatttttggttatgtctttattccagatatttagaaagttattttcccgcggcgacttgacccttccttcttccaaaaagagcacattagagaaggaacagtttgttaattggtgtagaaaggtgtatgaagcgttcaagacgaagcttttagctatcatttctgacatacctttcgaaacatctcttgggttagattctcttgatgtctatcttcaacttgcagagttagaatctactcattttgcatctgaaaagggcgcaccatttttccccaataaaacattcagaaagttaatcatcgccttatggtccagtaacatgggtgaaatagaggatgtcaaaagcagtggtgcgtctgaaaatttaatcatagtagaattcacggaaaaatattatacgaaatttgcagatattcaatactactttcaaagtgaatttaaccaattattagaggatccagcctaccaggacttgcttttgaaaaacgttggtaaatggttagctttagtaaatcatgacaaacattgctctagtgttgatgcagatttagagatctttgtaccaaatcccccacaagccatagagaacgagtccaaattcaagtccaatttcgagaaaaattggttatcccttttaaacggccaattgtctttacagcagtataagtctattttattaattttgcataagagaataatacctcatttccacactccaactaaattaatggatttccttactgattcctacaatttgcaaagctctaataaaaacgccggtgttgttccgatcttggctttgaatggcctttttgaattgatgaaaagattcaacttggaatatccaaatttttatatgaaactttatcaaattataaatccagacttaatgcatgttaaatacagagcaagatttttcaggttaatggacgtatttttgagttctacacatttatccgcccatttagtagcatctttcatcaaaaagttggccagactcaccttagaatctccaccctctgctattgtcaccgtgattcccttcatctataatttaatcaggaaacatccgaattgtatgattatgttgcacaacccagccttcatttccaacccattccagacacctgaccaagtggcgaacttgaaaactttgaaagaaaactatgtagatcccttcgatgttcatgaaagtgaccctgagttaactcatgcattggattcctctctttgggagttagcgtctttgatggaacattatcatcctaatgtagccacgttggcgaagatatttgctcaaccatttaagaagttgagttataacatggaagatttcttagactggaactatgattctttgctcaatgcagaatcttctagaaagttgaagacacttcctacgttagaatttgaggctttcacaaacgtttttgataatgaagacggcgatagcgaagcgtcttcccaaggtaacgtctacttgcctggggtagcatggtga

SEQ ID NO: 11697 - DNA, 1719 bp, Saccharomyces cerevisiae
atgtgtggtattttcgccgctttcaggcacgaagacgtgcatagatataagccaaaggctctacaactatcaaaaagaatcagacaccgtggtccagattggtccggtaatgctatcaagaactccactatatttgttcatgaaagactagccattgtcggtgtggaatccggtgctcaaccaattacttcttcagacggagagtacatgctatgtgttaacggtgaaatctacaaccacattcaattaagagaagaatgcgcagactacgagtttggaacactgagtgactgtgagcctatcatcccaatgtacttaaagcacgatatcgacgctcctaagtacttggatggtatgtttgcttggactctttacgacgctaaacaagatcgtattgtggcagccagagacccaatcggtattacgacattatatatgggacgctcttccgcttctccaaagaccgtttattttgcatccgaactaaaatgtttgactgacgactgtgacactatcactgcattcccaccgggccacgtatacgattctaagactgacaagatcacccgttacttcacaccagattggctggacgaaaaacgcattccttccaccccaatagattacatggcaattagacactccttagaaaaagccgttagaaagagattaatggccgaagtcccatacggtgttctattgtcgggtggtttggactcctctttaatcgcttccattgctgcccgtgaaactgcaaaggccactaacgatgtcgaaccatcaacttacgatagtaaggcaagacatctagcaggtatcgacgatgacggtaagctacacactgctggttggacaagtctccattcctttgccatcggtttaccaaatgctccagatttgcaagccgcaagaaaggttgccaaattcatcggctctattcatcatgaacacacctttacattacaagaaggtttggatgctttggacgacgtgatctaccatttggaaacttacgacgttaccactatcagagcttccactccaatgttcttactatccagaaagattaaggcccaaggggtcaagatggttctttccggtgaaggttccgatgaaatcttcggtggttatctatatttcgcacaagctccttctgcggcagaatttcacactgaatccgtgcaacgtgtcaagaacttgcatttggcagattgtttgagagctaacaagtctacgatggcttggggtctagaagctcgtgttccattcttagacagagaatttttgcaattgtgtatgaacatcgatccaaatgaaaagatgattaaaccaaaggaaggacgtattgaaaagtacattctaaggaaggcattcgacaccacaggagaaccagatgctaagccatatttaccagaagaaattttatggagacaaaaagaacaattttccgacggtgttggttactcctggatcgacggattaaaagataccgccgaagcagtcatttcagatgaaatgtttgccagtccaaaggccgaatggggtagtgacattccaaccacaaaagaggctttctggtacagactaaaattcgatgctttgttccctcaaaagaccgtggctgacaccgttatgagatggattccaaaggccgactggggttgtgctgaagatccttctggtagatatgcccaaattcatgaaaaacatatcgaataa

SEQ ID NO: 11698 - DNA, 1719 bp, Artificial Sequence
  Description of Artificial Sequence: Synthetic polynucleotide
atgtgtggtattttcgccgctttcaggcacgaagacgtgcatagatataagccaaaggctttacaattatccaaaagaatcagacaccgtggtccagattggtccggtaatgctatcaagaactccactatatttgttcatgaaagattggccattgtcggtgtggaatccggtgctcaaccaattacttcttctgacggagagtacatgctttgtgttaacggtgaaatctacaaccacattcaattaagagaagaatgcgcagactacgagtttggaacattgagtgactgtgagcctatcatcccaatgtacttaaagcacgatatcgacgctcctaagtacttggatggtatgtttgcttggactctttacgacgctaaacaagatcgtattgtggcagccagagacccaatcggtattacgacattatatatgggacgctcttccgcttctccaaagaccgtttattttgcatccgaattgaaatgtttgactgacgactgtgacactatcactgcattcccaccgggccacgtatacgattctaagactgacaagatcacccgttacttcacaccagattggttagacgaaaaacgcattccttccaccccaatagattacatggcaattagacactccttagaaaaagccgttagaaagagattaatggccgaagtcccatacggtgttttattgtctggtggtttggactcctctttaatcgcttccattgctgcccgtgaaactgcaaaggccactaacgatgtcgaaccatctacttacgatagtaaggcaagacatttagcaggtatcgacgatgacggtaagttgcacactgctggttggacaagtctccattcctttgccatcggtttaccaaatgctccagatttgcaagccgcaagaaaggttgccaaattcatcggctctattcatcatgaacacacctttacattacaagaaggtttggatgctttggacgacgtgatctaccatttggaaacttacgacgttaccactatcagagcttccactccaatgttcttattatccagaaagattaaggcccaaggggtcaagatggttctttccggtgaaggttccgatgaaatcttcggtggttatttgtatttcgcacaagctccttctgcggcagaatttcacactgaatccgtgcaacgtgtcaagaacttgcatttggcagattgtttgagagctaacaagtctacgatggcttggggtttggaagctcgtgttccattcttagacagagaatttttgcaattgtgtatgaacatcgatccaaatgaaaagatgattaaaccaaaggaaggacgtattgaaaagtacattttaaggaaggcattcgacaccacaggagaaccagatgctaagccatatttaccagaagaaattttatggagacaaaaagaacaattttccgacggtgttggttactcctggatcgacggattaaaagataccgccgaagcagtcatttctgatgaaatgtttgccagtccaaaggccgaatggggtagtgacattccaaccacaaaagaggctttctggtacagattgaaattcgatgctttgttccctcaaaagaccgtggctgacaccgttatgagatggattccaaaggccgactggggttgtgctgaagatccttctggtagatatgcccaaattcatgaaaaacatatcgaatga

SEQ ID NO: 11699 - DNA, 237 bp, Saccharomyces cerevisiae
atgagcactgccttcagaaaaataaaactaatatttaagaaaagtgatagtcaatatccgcaaaactatcgagcggaaattaaatcaagaaataagaatacagtaataacaaggcacgatctactaattgcacacgaaatgaaacaaagggcgtcgctagagaggagcaattcgattaggaatcttcagtcacaaggtaaaaggagatcagattcaaaagaatctcgaaaattgtaa

SEQ ID NO: 11700 - DNA, 237 bp, Artificial Sequence
  Description of Artificial Sequence: Synthetic polynucleotide
atgagcactgccttcagaaaaataaaattgatatttaagaaaagtgatagtcaatatccgcaaaactatagagcggaaattaaatctagaaataagaatacagtaataacaaggcacgatttattgattgcacacgaaatgaaacaaagggcgtctttggagaggagcaattctattaggaatcttcagtctcaaggtaaaaggagaagtgattctaaagaatctagaaaattgtga

SEQ ID NO: 11701 - DNA, 915 bp, Saccharomyces cerevisiae
atgactgtaaaagagtatactaaatcgaagttgccatgctcgatattgaatatcaaacctacagtcactaaaagtggcgaggatgcgcctcttctagtatggatccctggtaatcctgggcttttatactattatcaagaaatgctacatcatctacacttgaagcacccagattgggaaattcttggcatatcccatgccggaatgacattgaacgctcattctaatacaccgatattttctttacaagatcaagtagatcatcaggtagaggtaattaacaatttctcatgcaagaacaggaaaattattattatgggacattcggttggggcatacatcgtacaaaaagtatgcctttctaacaaactggttggctccgtacaaaaagttggtctcgttacaccaactgtgatggacattcacacctctgagatgggtatcaaaatgacagcggcacttcgttatattccaccattggctcatgtggtatcattgttcagttatattttcttttattggatcttatcagaagggttttcaagatttattattgataaatttatgggctgtggaagtactggttatcaggcagtactatctacaagaatttttttgactcataggcagtttgttcgtcaatctctaggattagctgcccaggagatggaagaaataactacgaactgggagtttcaagatagatttatcaattattgcgaagagaacggaatttctatttggtttctcttcagtagcaacgaccattgggtttctggtaagaccagatcacatttgtcggattattataaggataaagtcaagcaggaacgcttaaaaattgatgtcactgacaaaatacctcattcatttgtagtaaaacatgcagaatatgctatcaatgcatttttttag

SEQ ID NO: 11702 - DNA, 915 bp, Artificial Sequence
  Description of Artificial Sequence: Synthetic polynucleotide
atgactgtaaaagagtatactaaatccaagttgccatgctctatattgaatatcaaacctacagtcactaaaagtggcgaggatgcgcctcttttggtatggatccctggtaatcctgggcttttatactattatcaagaaatgttgcatcatttgcacttgaagcacccagattgggaaattcttggcatatcccatgccggaatgacattgaacgctcattctaatacaccgatattttctttacaagatcaagtagatcatcaggtagaggtaattaacaatttcagttgcaagaacaggaaaattattattatgggacattctgttggggcatacatcgtacaaaaagtatgcctttctaacaaattggttggctccgtacaaaaagttggtctcgttacaccaactgtgatggacattcacacctctgagatgggtatcaaaatgacagcggcacttcgttatattccaccattggctcatgtggtatctttgttcagttatattttcttttattggatcttatctgaagggttttccagatttattattgataaatttatgggctgtggaagtactggttatcaggcagtattatctacaagaatttttttgactcataggcagtttgttcgtcaatctttgggattagctgcccaggagatggaagaaataactacgaactgggagtttcaagatagatttatcaattattgcgaagagaacggaatttctatttggtttctcttcagtagcaacgaccattgggtttctggtaagaccagaagccatttgagtgattattataaggataaagtcaagcaggaacgcttaaaaattgatgtcactgacaaaatacctcattcttttgtagtaaaacatgcagaatatgctatcaatgcatttttttga

SEQ ID NO: 11703 - DNA, 1308 bp, Saccharomyces cerevisiae
atgtctggttatttttcagggttttctctaaacaagatcaccgattcaattgccaccgctgctcacaagacccaagacactttgaacaatgcattagcaaatgcaaatgtaaacttaaatgaccctcaaacaagactatcaatcaaatcgcgaactagatttgttcaggaatcattgggtactgtatcagatataagtaaattaccaccacagtaccaattcttggagaaaaaaagtgattccttagagaaggtatgtaaaaggattctactggtgtccaaaacgttcgaagtagagggctacgactatccaccaaatttaacggagagtatttcggattggtggtctctcaataaagatggctggtttggctctaaaaaatccgaaagttccactaaaaaaaagggatctaaccatgacgatgcttttttgccaaggtcttttgctcaagccatctcaaaagccgctgttgactgcgaatgtgaatttcaaaatttagaacacaacgaaaaggcagaactaaagaagaaaaaggagtctatcaaaactgcacagacaacggaagctcagggtgccgaccataatgaagaagacgaggaagatgaagaagatgaagaagatgatgaagatttgtctaatttgatcaaagttttcgattcgtggtcgacatgctataaaaatatcgatgaagggaaggcagagatggattctatgatggtcaaggaattcaacaaaaaattagaaacattaataaaccaagacttcaagaaggtccatgacctgcgcaaaaaagtggaagaatcaagactcaaatttgatacaatgcgttatgaagtcaaagcaaaagaagcagagttagaggcgaaaaaagctgaagccacaggagaagcacatagcaaggatgttagcgcaaaggacattagcgcaaacactaccacctcttttgacgaaacgccttctaccgaggatgaaaagccaaaatcagagggtgccgaagaggaatcaaagaaagaagcgaatgagcctactgttgatgacgttgctgatagaaaagaagatttaaagagtaacaaagtaaatgatgagccaccgattgaagaatctgaggataataaattactggaaaaactggaggatgaatttgtctccaatactacagcagcagtggaaacaatggaagaaatcactgacagttctgaaattctgggcttgataaaactgttccagaatttccagttggtttactttagacaatgtgtccaagaagtggaggcaaaccttaaagttctaaatggtttggaaatttag

SEQ ID NO: 11704 - DNA, 1308 bp, Artificial Sequence
  Description of Artificial Sequence: Synthetic polynucleotide
atgtctggttatttttctgggttttctttgaacaagatcaccgattctattgccaccgctgctcacaagacccaagacactttgaacaatgcattagcaaatgcaaatgtaaacttaaatgaccctcaaacaagattatctatcaaatctagaactagatttgttcaggaatctttgggtactgtatctgatataagtaaattaccaccacagtaccaattcttggagaaaaaaagtgattccttagagaaggtatgtaaaaggattttattggtgtccaaaacgttcgaagtagagggctacgactatccaccaaatttaacggagagtatttctgattggtggtctctcaataaagatggctggtttggctctaaaaaatccgaaagttccactaaaaaaaagggatctaaccatgacgatgcttttttgccaaggtcttttgctcaagccatctccaaagccgctgttgactgcgaatgtgaatttcaaaatttagaacacaacgaaaaggcagaattgaagaagaaaaaggagtctatcaaaactgcacagacaacggaagctcagggtgccgaccataatgaagaagacgaggaagatgaagaagatgaagaagatgatgaagatttgtctaatttgatcaaagttttcgattcttggtctacatgctataaaaatatcgatgaagggaaggcagagatggattctatgatggtcaaggaattcaacaaaaaattagaaacattaataaaccaagacttcaagaaggtccatgaccttcgcaaaaaagtggaagaatctagactcaaatttgatacaatgcgttatgaagtcaaagcaaaagaagcagagttagaggcgaaaaaagctgaagccacaggagaagcacatagcaaggatgttagcgcaaaggacattagcgcaaacactaccacctcttttgacgaaacgccttctaccgaggatgaaaagccaaaaagtgagggtgccgaagaggaatccaagaaagaagcgaatgagcctactgttgatgacgttgctgatagaaaagaagatttaaagagtaacaaagtaaatgatgagccaccgattgaagaatctgaggataataaattattggaaaaattagaggatgaatttgtctccaatactacagcagcagtggaaacaatggaagaaatcactgacagttctgaaattttgggcttgataaaattattccagaatttccagttggtttactttagacaatgtgtccaagaagtggaggcaaaccttaaagttttgaatggtttggaaatttga

SEQ ID NO: 11705 - DNA, 522 bp, Saccharomyces cerevisiae
atgctagccctagctgataacattctacgtataataaatttcctatttttggttatttccatcggtttaatcagttcgttgttaaacacccaacataggcacagctccagagtaaactactgtatgtttgcttgtgcatatggtatattcaccgattcattgtacggtgtctttgccaacttcattgaaccattggcatggccactagttttgttcacactggactttttgaactttgtgttcactttcactgccggtacagtgttggccgttggtatcagagctcactcatgtaacaacagctcatacgttgacagtaacaagattactcaaggttccggtaccagatgtagacaagctcaagccgctgttgcattcctctacttctcttgtgccatctttttggctaagaccctgatgtctgttttcaacatgatctccaatggtgcctttggttctggttctttctccaagagaagaagaactggccaagtcggtgttccaaccatttcccaagtctaa

SEQ ID NO: 11706 - DNA, 522 bp, Artificial Sequence
  Description of Artificial Sequence: Synthetic polynucleotide
atgttggccttagctgataacattttgcgtataataaatttcttatttttggttatttccatcggtttaatcagttctttgttaaacacccaacataggcacagctccagagtaaactactgtatgtttgcttgtgcatatggtatattcaccgattctttgtacggtgtctttgccaacttcattgaaccattggcatggccattagttttgttcacattagactttttgaactttgtgttcactttcactgccggtacagtgttggccgttggtatcagagctcacagctgtaacaacagctcttacgttgacagtaacaagattactcaaggttccggtaccagatgtagacaagctcaagccgctgttgcattcctctacttctcttgtgccatctttttggctaagaccttgatgtctgttttcaacatgatctccaatggtgcctttggttctggttctttctccaagagaagaagaactggccaagtcggtgttccaaccatttcccaagtctga

SEQ ID NO: 11707 - DNA, 621 bp, Saccharomyces cerevisiae
atgattttattaaagaggacaaaaattaggggcgtcagcgtctcttttgtaagcttgcaaagaaggactcacagcagactggtgaaccccataaggcagcaacatcaacaaattaccaagcaaaggagttcaaagattttaaagaatgcgcatttctatgactttagatcgctgcccaaagtacctactacacagtatttggaagctagggagctcacccgcgatattctgtatagcggatacaggccagtaatgtacccagtgaaggaaaacccgctattcagagataagaagagaaagtccttgcaaacgttattaacaatgaacgagaaaacaaacgcagaggcgaagacgatcgatgagaaaaagcacaagaacatattgtttggtgaacgtggcactggtggtataatgtcaggtggcgtgaacggtacatggaagtacaatcccaccgtacccaatgagctgttgccattcaattggtggtctacgtccagtatgggtatggaatattttcctgaatggaaaaacgtgcccccatatatgatgagaaagttgaagccgtttgacaaggcactgcaaatgcggttgacacacaaaagcaaaaaaaagatgaaataa

SEQ ID NO: 11708 - DNA, 621 bp, Artificial Sequence
  Description of Artificial Sequence: Synthetic polynucleotide
atgattttattaaagaggacaaaaattaggggcgtcagcgtctcttttgtaagcttgcaaagaaggactcacagcagattagtgaaccccataaggcagcaacatcaacaaattaccaagcaaaggagttccaagattttaaagaatgcgcatttctatgactttagatctttacccaaagtacctactacacagtatttggaagctagggagctcacccgcgatattctttatagcggatacaggccagtaatgtacccagtgaaggaaaacccgcttttcagagataagaagagaaagtccttgcaaacgttattaacaatgaacgagaaaacaaacgcagaggcgaagacgatcgatgagaaaaagcacaagaacatattgtttggtgaacgtggcactggtggtataatgagtggtggcgtgaacggtacatggaagtacaatcccaccgtacccaatgagttattgccattcaattggtggtctacgtccagtatgggtatggaatattttcctgaatggaaaaacgtgcccccatatatgatgagaaagttgaagccgtttgacaaggcattacaaatgagattgacacacaaaagcaaaaaaaagatgaaatga

SEQ ID NO: 11709 - DNA, 1398 bp, Saccharomyces cerevisiae
atgcgtggagaatggcaggaatttaagacacctgcaggcaaaaagtattactataataagaacacgaagcagtctcgatgggaaaaacctaatttgaagaaaggctctaacctagaaagcaatgcgaaagaatcacagacagagaggaagccaacattttcattagaactggttaatggttggcacttaataatatacaacgatggtacaaaactttactttaatgatgactctaaggagttcaaaaatgacatcagtcaagaggacgacagcaggtgtcgctcattaatcgagtcgttagataaggaaaaactggttcttctgattggcgttgccagaggttacactatgcgggaggaggacattgataaaatcctcgaatcttgcaacgaagagattcatctatttaaaagaaatcaagacgaagttgagagaaaagatgagatcagcgaagaggcgggtgacgtaaaatcccctttacaggaaagccacactgggctagtcagcgggtatggttcatcttcgggggaggaagacgaagaggaagacgaagaggaagacgaagagaatgaagaacaaattgtaaatcaagatatcagcattatcgatgatctgaatcgtattgatacagatgacattgacgagcgtaatatcttcttcgaattattcgataggtataaactagacaagttttccacgtggtcgctgcaaagcaagaaaatcgaaaacgatcctgatttttacaagatcagagatgacacagttcgtgaaagtcttttcgaagaatggtgcggcgagcgcagtggcaatgccaccgctgaagaaagcgatagcgaagataatagcgaagacgatagcgaagtactagaaccaacaaaataccattatctggcacaaattgttgctaatgcgggaacaatcgcacccgacaccatcccacaagatataaggaaacaacaaaaagcgttatacaaggcctacaaaatcaaggagtatataccgtcgaagcgcgaccaagacaaattcgtttcccaactgctgttttattataagacgttcgacttggaacagcggaaagagattttctgcgattgcctacgggatcacgaacgagactttacgggggcagtcgaatcgctgcgtcaggacaaagagcttatcgaccgatggcaaacacttctgaaagcacccgcggacagtagtagtatagaggatatattgctgagcattgagcacaggtgttgtgtcagcccaatagtggtgacggaaccacgctactacgtcgtgggcattctggagaagaccgtggtctgggtgcggtggctagccgccgaggtcgggccatcaagccggtttaccccagtgggcgcggggaacgagccgataaatccggaatag

SEQ ID NO: 11710 - DNA, 1398 bp, Artificial Sequence
  Description of Artificial Sequence: Synthetic polynucleotide
atgcgtggagaatggcaggaatttaagacacctgcaggcaaaaagtattactataataagaacacgaagcagtctcgttgggaaaaacctaatttgaagaaaggctctaacttggaaagcaatgcgaaagaatctcagacagagaggaagccaacattttctttagaattggttaatggttggcacttaataatatacaacgatggtacaaaactttactttaatgatgactctaaggagttcaaaaatgacatcagtcaagaggacgacagcaggtgtcgctctttaatcgagtctttagataaggaaaaattggttcttttgattggcgttgccagaggttacactatgagagaggaggacattgataaaatcctcgaatcttgcaacgaagagattcatttatttaaaagaaatcaagacgaagttgagagaaaagatgagatcagcgaagaggcgggtgacgtaaaatcccctttacaggaaagccacactgggttagtcagcgggtatggttcttcttctggggaggaagacgaagaggaagacgaagaggaagacgaagagaatgaagaacaaattgtaaatcaagatatcagcattatcgatgatttgaatcgtattgatacagatgacattgacgagcgtaatatcttcttcgaattattcgataggtataaattagacaagttttccacgtggtctttacaaagcaagaaaatcgaaaacgatcctgatttttacaagatcagagatgacacagttcgtgaaagtcttttcgaagaatggtgcggcgagcgcagtggcaatgccaccgctgaagaaagcgatagcgaagataatagcgaagacgatagcgaagtattggaaccaacaaaataccattatttggcacaaattgttgctaatgcgggaacaatcgcacccgacaccatcccacaagatataaggaaacaacaaaaagcgttatacaaggcctacaaaatcaaggagtatataccgtccaagcgcgaccaagacaaattcgtttcccaattacttttttattataagacgttcgacttggaacagagaaaagagattttctgcgattgcttgagagatcacgaaagagactttacgggggcagtcgaatctttacgtcaggacaaagagcttatcgacagatggcaaacacttttgaaagcacccgcggacagtagtagtatagaggatatattgttgagcattgagcacaggtgttgtgtcagcccaatagtggtgacggaaccacgctactacgtcgtgggcattttagagaagaccgtggtctgggtgagatggttggccgccgaggtcgggccatccagcagatttaccccagtgggcgcggggaacgagccgataaatccggaatga

SEQ ID NO: 11711 - DNA, 423 bp, Saccharomyces cerevisiae
atgagatcattcgtaacaaataacgatatacctgttggatatgtaacgccaaaattcccctcattatactggcccatcaacaactcgaagtataatactgcattcttatactatatatctgacatttggaaattttcgctgtactggactttgatctttaatggtgcattttacgttactgctggtgtgtatgctagcttgacccatagaaagaaggctggaagtgtatggatattcgtcatgtacgtcttatacggaggcgttcaaggcttgacgactggtacagttatggggtttttaataggtgcgatctatagatctggtttattttctatgtctacatgggtcccactttgttgcgcagtagtccaaatccttttcgatgtggtgctaagttattccatggttggttccgttatgtga

SEQ ID NO: 11712 - DNA, 423 bp, Artificial Sequence
  Description of Artificial Sequence: Synthetic polynucleotide
atgagatctttcgtaacaaataacgatatacctgttggatatgtaacgccaaaattcccctctttatactggcccatcaacaactccaagtataatactgcattcttatactatatatctgacatttggaaattttctttgtactggactttgatctttaatggtgcattttacgttactgctggtgtgtatgctagcttgacccatagaaagaaggctggaagtgtatggatattcgtcatgtacgtcttatacggaggcgttcaaggcttgacgactggtacagttatggggtttttaataggtgcgatctatagatctggtttattttctatgtctacatgggtcccactttgttgcgcagtagtccaaatccttttcgatgtggtgttgagttattccatggttggttccgttatgtga

SEQ ID NO: 11713 - DNA, 648 bp, Saccharomyces cerevisiae
atgtctgcttcattgattaatcgttccttaacaaacattaggacagaactggattttctaaaagggtcaaatgtcatttcaaatgacgtttacgatcaaataaataagagcttgccggcaaaatgggatcctgccaatgcaccccgcaacgccagtccagcttccttggaatatgtcgaagctctttatcaatttgatcctcaacaagatggtgatttgggcttaaaaccaggtgacaaggtccaacttttagaaaaattatctccagagtggtacaagggtagctgtaatggccgtaccggtattttcccagcaaactatgtcaagccagctttctctgggtctaacggtccatccaatcttccaccacctccacagtataaagctcaagaattacaacaaatccccacgcaaaatagtgccgcatcatcttatcaacagcagccatttcctccaccttccacaaattattatcagcagcctcaacaacagccgcaacaagctcctcctccccaacaacaacaacaacaacaacaacatcagagctcacatagccacttgaagagctttggtagcaaattgggtaatgccgccatttttggggcaggcgctagtattgggtcagatattgttaataatatcttttaa

SEQ ID NO: 11714 - DNA, 648 bp, Artificial Sequence
  Description of Artificial Sequence: Synthetic polynucleotide
atgtctgcttctttgattaatcgttccttaacaaacattaggacagaattagattttttgaaagggtctaatgtcatttctaatgacgtttacgatcaaataaataagagcttgccggcaaaatgggatcctgccaatgcaccccgcaacgccagtccagcttccttggaatatgtcgaagctctttatcaatttgatcctcaacaagatggtgatttgggcttaaaaccaggtgacaaggtccaacttttagaaaaattatctccagagtggtacaagggtagctgtaatggccgtaccggtattttcccagcaaactatgtcaagccagctttctctgggtctaacggtccatccaatcttccaccacctccacagtataaagctcaagaattacaacaaatccccacgcaaaatagtgccgcatcttcttatcaacagcagccatttcctccaccttccacaaattattatcagcagcctcaacaacagccgcaacaagctcctcctccccaacaacaacaacaacaacaacaacatcagagctctcatagccacttgaagagctttggtagcaaattgggtaatgccgccatttttggggcaggcgctagtattgggtctgatattgttaataatatcttttga

SEQ ID NO: 11715 - DNA, 1851 bp, Saccharomyces cerevisiae
atgatcatcaataggcgtattttgaaatcttttgaagagataagtcattcattagaggaatcactacgagaggttgcatttgattcacagcaacaattgattcaagacgtacgtgaggaaaatgaagaactaagtaggttacaagatcaattacaattgatcaggtcaattgttgaaaaaatctgcatttcaatcaaaactgacaatattgactcttattgttcggtgccttttgatttgctatacaatatttgcaaggacattgctgatccctcatcctttgaagacggagatttgcaatatcttgttagccaagccatatttgagtacattatattattgtgctactattctgtgaccaacgaatgcgtccaaggtttacctgccgtgtatgaagctgaacagtactacaaaacagtaagtgattcaatcctaaagtcttttctttactgtttacaaaattcagtatcgacaatacgtcttttatctcaaactgttttgaaggatgtaaataagaaaaaactgtcgcatcaaaaatggtccctaaaggccttgtcagttgatttactagaaaaaatacgcccaagaataaacaaatttatggtgattcggaacttcaggtttgtcgggctaccgaagaaaccaattgaaatagcttcattggtttctgatatacctcgcggtatagtgcacgaaagacttgatatggtcactcaatcatcaaagtattatactattaaactggggcagttgatcactgaattcgatcaacaaccagaagaaaatggtatgttcaccgaagtacatttaccgaactacgaaagacgtctaaaatctttacaggacttctttggattagccatgtctgattcgaatttactagatgtgatccgatgctcagcgaaatttcataaagatcatcctttaagaaggttcactaaaccaagtatattgactagatactggccttcaattttgttgtgtcttttatatggaccatcttctgttatgtcgttgtggaattcccggtattttattcaagatttcattaagaccaatgtcgttgactttgcgaaagggctgatcttgaactggttatgggcacccctgaaacaggtttggtctactgttaagcatgacgagggaagcgccatttcagtgacatcacaggagacattaaactctgacatggattctcttaccagaatgattgttagttttgttgtggataatagtgattcgacgtctaacagccccatagaccctattctattgagtactaaagtcgaacatggtgatttgaccgaatttatggaaatatatgaaacacaactacatcatccgataaagaatatagctacgggtggattagtcaggtctttattgattcaactgcaaaaaacaaaagtcgatggatctatggcattgaatggcattgataaaatgctgaaatcgcaacagttggtgtttggagttgtagcattatctccggctttagtgatactatattcttctatagtggcgttaaaaagatttgtcaaactaggcaatgtctggtctaatgaaaaacggtatagggagcaaataagtataagtttgaataatgtggaaagagttttgaattattctaaacaaggtgcggacgccgatgaggaacacttaaaccagggtctactagtgattgaggtttctaacttatacaaattgggaagttttttgatcccgcgttcaagaaagaaagaatggtttagggacgttgaggaactggtggataccaatcttgactccggagctcatataaatgtcgtcaacaggatataccacgtatatggcaggtttttaatccattag

SEQ ID NO: 11716 - DNA, 1851 bp, Artificial Sequence
  Description of Artificial Sequence: Synthetic polynucleotide
atgatcatcaataggcgtattttgaaatcttttgaagagataagtcattctttagaggaatctttaagagaggttgcatttgattctcagcaacaattgattcaagacgtacgtgaggaaaatgaagaattaagtaggttacaagatcaattacaattgatcaggtctattgttgaaaaaatctgcatttccatcaaaactgacaatattgactcttattgttctgtgccttttgatttgttgtacaatatttgcaaggacattgctgatccctcttcctttgaagacggagatttgcaatatcttgttagccaagccatatttgagtacattatattattgtgctactattctgtgaccaacgaatgcgtccaaggtttacctgccgtgtatgaagctgaacagtactacaaaacagtaagtgattctatcttgaagtcttttctttactgtttacaaaattctgtatctacaatacgtcttttatctcaaactgttttgaaggatgtaaataagaaaaaattatctcatcaaaaatggtccttgaaggccttgagtgttgatttattggaaaaaatacgcccaagaataaacaaatttatggtgattagaaacttcaggtttgtcgggttgccgaagaaaccaattgaaatagcttctttggtttctgatatacctcgcggtatagtgcacgaaagacttgatatggtcactcaatcttccaagtattatactattaaattggggcagttgatcactgaattcgatcaacaaccagaagaaaatggtatgttcaccgaagtacatttaccgaactacgaaagacgtttgaaatctttacaggacttctttggattagccatgtctgattctaatttattagatgtgatccgttgctctgcgaaatttcataaagatcatcctttaagaaggttcactaaaccaagtatattgactagatactggccttctattttgttgtgtcttttatatggaccatcttctgttatgtctttgtggaattccagatattttattcaagatttcattaagaccaatgtcgttgactttgcgaaagggttgatcttgaactggttatgggcacccttgaaacaggtttggtctactgttaagcatgacgagggaagcgccatttctgtgacatctcaggagacattaaactctgacatggattctcttaccagaatgattgttagttttgttgtggataatagtgattctacgtctaacagccccatagaccctattttattgagtactaaagtcgaacatggtgatttgaccgaatttatggaaatatatgaaacacaattgcatcatccgataaagaatatagctacgggtggattagtcaggtctttattgattcaattacaaaaaacaaaagtcgatggatctatggcattgaatggcattgataaaatgttgaaatctcaacagttggtgtttggagttgtagcattatctccggctttagtgatactttattcttctatagtggcgttaaaaagatttgtcaaattgggcaatgtctggtctaatgaaaaaagatatagggagcaaataagtataagtttgaataatgtggaaagagttttgaattattctaaacaaggtgcggacgccgatgaggaacacttaaaccagggtttattggtgattgaggtttctaacttatacaaattgggaagttttttgatcccgcgttccagaaagaaagaatggtttagggacgttgaggaattagtggataccaatcttgactccggagctcatataaatgtcgtcaacaggatataccacgtatatggcaggtttttaatccattga

SEQ ID NO: 11717 - DNA, 1869 bp, Saccharomyces cerevisiae
atgaacagacaggaatccataaattcgtttaattcagacgaaacatcttcgttgtctgatgtagaaagtcagcagccgcaacaatatatcccttcagagagtggatctaaatccaacatggctcctaatcaactgaagttgacccggacggaaaccgtgaagtcattgcaggacatgggtgtgagctccaaagcccccgttcctgatgttaatgctcctcaatctagcaagaataagatttttcctgaagaatatactttagaaacccctacaggtttagttcctgtcgccactctacattccataggtagaacttctactgcgatttcccgtacgagaactagacagatcgatggcgcttcttcgccttcttctaatgaagatgctttagaaagtgataataacgaaaagggtaaagaaggcgactctagtggtgcgaatgacgaagctccagatctagatccggaaattgaattcgttacctttgtgactggcgatccagaaaacccccataactggcctgcatggatccgttggagttacactgtcctactgtcaatcttagttatttgtgtcgcctacgggtctgcttgtatcagtggtgggttgggaaccgttgaaaagaaataccatgtaggtatggaagccgctattttatcggtttctttaatggttattgggttctcgctgggtcctttgatttggtctcctgttagtgatctttacggtagaagagttgcttactttgtttctatgggtctttatgtcatcttcaatatcccttgcgccttagctccaaatctaggtagtcttttagcttgtagatttttatgtggtgtttggtcatcatctggtttgtgtttagttggtgggtctattgccgatatgttcccaagtgaaacaagaggtaaggctattgctttcttcgcttttgctccttacgttggtcccgttgttggtccactagttaacggttttatttccgtttctaccggacgtatggacctgattttctgggtcaatatggcctttgcaggtgttatgtggatcatatcttctgccatcccagaaacgtacgctccagttatcttgaagagaaaggctgctagattaagaaaggaaactggtaatcccaagattatgactgagcaggaagcgcaaggtgtcagtatgggtgaaatgatgagggcttgtctgttgagacctttgtacttctctgtcactgaacctgttctagttgctacttgtttctacgtgtgtttgatttactctctactatatgcgttcttctttgccttccctgtcattttcggtgaactatatggctacaaagacaaccttgtgggtttgatgtttattcctattgttatcggtgctctttgggcgttagccacaactttctactgtgaaaacaagtatttacaaattgtcaaacagcgtaaacctactcctgaagatcgtttgctaggtgctaagatcggtgctccatttgctgcaattgctttatggatcctgggtgctaccgcttataaacatattatttgggttggtccagcttcagctggtttagcttttggtttcggtatggtgttgatttattattcattgaataattacattattgattgctacgtccaatacgcatccagtgctctggctacaaaggttttcttaagatccgccggtggtgctgccttccccttgtttaccattcaaatgtaccacaaattgaatctgcactggggttcttggttgttggctttcatctccactgctatgattgctttaccttttgcattttcttactggggcaaaggtttgagacataagttatccaagaaggattattccatagatagtattgaataa

SEQ ID NO: 11718 - DNA, 1869 bp, Artificial Sequence
  Description of Artificial Sequence: Synthetic polynucleotide
atgaacagacaggaatccataaattcttttaatagtgacgaaacatcttctttgtctgatgtagaaagtcagcagccgcaacaatatatcccttctgagagtggatctaaatccaacatggctcctaatcaattgaagttgaccagaacggaaaccgtgaagtctttgcaggacatgggtgtgagctccaaagcccccgttcctgatgttaatgctcctcaatctagcaagaataagatttttcctgaagaatatactttagaaacccctacaggtttagttcctgtcgccactttacattccataggtagaacttctactgcgatttcccgtacgagaactagacagatcgatggcgcttcttctccttcttctaatgaagatgctttagaaagtgataataacgaaaagggtaaagaaggcgactctagtggtgcgaatgacgaagctccagatttggatccggaaattgaattcgttacctttgtgactggcgatccagaaaacccccataactggcctgcatggatccgttggagttacactgtcttattatctatcttagttatttgtgtcgcctacgggtctgcttgtatcagtggtgggttgggaaccgttgaaaagaaataccatgtaggtatggaagccgctattttaagtgtttctttaatggttattgggttctccttgggtcctttgatttggtctcctgttagtgatctttacggtagaagagttgcttactttgtttctatgggtctttatgtcatcttcaatatcccttgcgccttagctccaaatttgggtagtcttttagcttgtagatttttatgtggtgtttggtcttcttctggtttgtgtttagttggtgggtctattgccgatatgttcccaagtgaaacaagaggtaaggctattgctttcttcgcttttgctccttacgttggtcccgttgttggtccattagttaacggttttatttccgtttctaccggacgtatggacttgattttctgggtcaatatggcctttgcaggtgttatgtggatcatatcttctgccatcccagaaacgtacgctccagttatcttgaagagaaaggctgctagattaagaaaggaaactggtaatcccaagattatgactgagcaggaagcgcaaggtgtcagtatgggtgaaatgatgagggcttgtttgttgagacctttgtacttctctgtcactgaacctgttttggttgctacttgtttctacgtgtgtttgatttactctttattatatgcgttcttctttgccttccctgtcattttcggtgaattgtatggctacaaagacaaccttgtgggtttgatgtttattcctattgttatcggtgctctttgggcgttagccacaactttctactgtgaaaacaagtatttacaaattgtcaaacagcgtaaacctactcctgaagatcgtttgttgggtgctaagatcggtgctccatttgctgcaattgctttatggatcttgggtgctaccgcttataaacatattatttgggttggtccagcttctgctggtttagcttttggtttcggtatggtgttgatttattattctttgaataattacattattgattgctacgtccaatacgcatccagtgctttggctacaaaggttttcttaagatccgccggtggtgctgccttccccttgtttaccattcaaatgtaccacaaattgaatttacactggggttcttggttgttggctttcatctccactgctatgattgctttaccttttgcattttcttactggggcaaaggtttgagacataagttatccaagaaggattattccatagatagtattgaatga

SEQ ID NO: 11719 - DNA, 1404 bp, Saccharomyces cerevisiae
atgcattgcgtactagcgcgaatattgttatggttcttaatagtagatctaagcgtcatacgggcgcttgtccttccaccattgaaagattatgatccgttagagcctttgatgaaaagagacatggccatgggtcaacggaacagattcaaagtcgacggccaattgccgcccatactaaattccacagatgtgacagatgatcagagaagtctgcatacgcctggagagattccatcttatgtcatcaatcattgtcccttagtgcacttgtatagcgaagagaaatattggccatcggacattgctgagtacgttcaaaacttccaaattaaagataaaaacggcaattctatatccactcatgaaaatttgacactgcatgacttgaaggcggaataccacgtagatttatttggcaacaaaacggaaacgcatatccccagtagcgaggtatttttaaccagtttggacgatttcgacaaggaccctaaatggttgctcggtcatctacccgaatacggaacaggctacaactctaaggcgcctgctattctgatcgtagtcgacaaggggaacgggtgggttgatgcgttctggtttttcttctacccattcaatcatggcccttttattatgggccatggaccctggggcaatcacgtcggtgactgggaacactctttggttcggttttataaaggtattccaaaatatctttggatgagtgcgcattccagtggaacaggctacagatacgaagctgttgagaaatttaagaaactacggaaaagaaaacagcaagatagtgacgatggtggggatactatactggaaagaccgttgatttttagtgctagaggcacgcatgctaattatgcatccgctgggcagcatgctcatgacattcctttttttttcatgcctttgagtgattttaccgatcgtggtcccctgtgggatccatctttgaacttttactcctatacttttgatggtaaaactgtgacaccctcctcagagagagaagaatctctcggtttggattggttgcattttcaaggtggatggggtgatcaacaactaccagctagagatccaagacagaaatggtgcgtagctcaatggaagtatatcggaggtcctcgtggccccctgtttaagaaattggatagattgaatctatgcggcggtgtgaaaaagtggaatttctggaatggtggctgccccgcaagaagattgataaaaaaagcagaaggcttggactctgagagcactgatcttatgggtgataattgtggtgtcctactctatagaatcagaccaaaatggctgagaggaattctaagatttctaatgtggagaggtatactctgttctcttatggaatttttcaccaattga

SEQ ID NO: 11720 - DNA, 1404 bp, Artificial Sequence
  Description of Artificial Sequence: Synthetic polynucleotide
atgcattgcgtattggcgagaatattgttatggttcttaatagtagatttgagcgtcataagagcgcttgtccttccaccattgaaagattatgatccgttagagcctttgatgaaaagagacatggccatgggtcaaagaaacagattcaaagtcgacggccaattgccgcccatattgaattccacagatgtgacagatgatcagagaagtttgcatacgcctggagagattccatcttatgtcatcaatcattgtcccttagtgcacttgtatagcgaagagaaatattggccatctgacattgctgagtacgttcaaaacttccaaattaaagataaaaacggcaattctatatccactcatgaaaatttgacattgcatgacttgaaggcggaataccacgtagatttatttggcaacaaaacggaaacgcatatccccagtagcgaggtatttttaaccagtttggacgatttcgacaaggaccctaaatggttgctcggtcatctccccgaatacggaacaggctacaactctaaggcgcctgctattttgatcgtagtcgacaaggggaacgggtgggttgatgcgttctggtttttcttctacccattcaatcatggcccttttattatgggccatggaccctggggcaatcacgtcggtgactgggaacactctttggttagattttataaaggtattccaaaatatctttggatgagtgcgcattccagtggaacaggctacagatacgaagctgttgagaaatttaagaaattaagaaaaagaaaacagcaagatagtgacgatggtggggatactatattggaaagaccgttgatttttagtgctagaggcacgcatgctaattatgcatccgctgggcagcatgctcatgacattcctttttttttcatgcctttgagtgattttaccgatcgtggtcccctttgggatccatctttgaacttttactcctatacttttgatggtaaaactgtgacaccctcctctgagagagaagaatctctcggtttggattggttgcattttcaaggtggatggggtgatcaacaattaccagctagagatccaagacagaaatggtgcgtagctcaatggaagtatatcggaggtcctcgtggccccttatttaagaaattggatagattgaatttatgcggcggtgtgaaaaagtggaatttctggaatggtggctgccccgcaagaagattgataaaaaaagcagaaggcttggactctgagagcactgatcttatgggtgataattgtggtgtcttgctctatagaatcagaccaaaatggttgagaggaattttaagatttttgatgtggagaggtatactctgttctcttatggaatttttcaccaattga

SEQ ID NO: 11721 - DNA, 759 bp, Saccharomyces cerevisiae
atggctgccgcatgcatttgtcaacctaatcttcttgagattaatgtatctgatggaccactggatatgatccgcaagaaaagaaaaatacaacagccgcaactacgtccaccccttcgagagaataaatgccaaccacacttttctgtacgaaaggtaaaccagtcttacataatttctctccataaagaaatcacatgccaactcattgcagaaattgtcaaacaaaagttatcgaggatttgggaaaaagtatacataccatcttatgaactgatatcagacaaagacggtaatcaaatttatgtggaacagagtgtcgacgaaaataggctaacttctgagattatggagaaactggaccccaacaatattgatatagaggcgatcgaaatattattcgacgactatcacctagaattatcacgcttgacaaacggtattattatatctagtgccaatgatcacttttacagggaattctccttcaataacataattgatgacaactttaaaatttgtggaacaagcatgtctgcagacagttttgataagatttatggcgttatgtggattgaagtacctttcaatggcaatggcttacagaatgatagcgccgttaatagggtttcaacatctcacaatcagatagaagaattgaatgacatagagcaggagataagagcttttaatattagtcgaagtaatcaagaaagtatcatcaaaaaggaagtatctagaagattgaatgggcggtaa

SEQ ID NO: 11722 - DNA, 759 bp, Artificial Sequence
  Description of Artificial Sequence: Synthetic polynucleotide
atggctgccgcatgcatttgtcaacctaatcttcttgagattaatgtatctgatggaccattagatatgatccgcaagaaaagaaaaatacaacagccgcaattgcgtccaccccttcgtgagaataaatgccaaccacacttttctgtaagaaaggtaaaccagtcttacataatttctctccataaagaaatcacatgccaactcattgcagaaattgtcaaacaaaagttatctaggatttgggaaaaagtatacataccatcttatgaattgatatctgacaaagacggtaatcaaatttatgtggaacagagtgtcgacgaaaataggttaacttctgagattatggagaaattagaccccaacaatattgatatagaggcgatcgaaatattattcgacgactatcacttggaattatctcgcttgacaaacggtattattatatctagtgccaatgatcacttttacagggaattctccttcaataacataattgatgacaactttaaaatttgtggaacaagcatgtctgcagacagttttgataagatttatggcgttatgtggattgaagtacctttcaatggcaatggcttacagaatgatagcgccgttaatagggtttctacatctcacaatcagatagaagaattgaatgacatagagcaggagataagagcttttaatattagtagaagtaatcaagaaagtatcatcaaaaaggaagtatctagaagattgaatgggcgttga

SEQ ID NO: 11723 - DNA, 2163 bp, Saccharomyces cerevisiae
atgcctttgagaaatctaactgaaacgcacaactttagtagcacaaacctggacacagatggtacaggcgacgatcatgatggtgctcctctttcctcatctccttcttttggacaacaaaatgacaatagcaccaacgataatgctggtctcacaaacccttttatggggagtgacgaagaatctaatgcgcgggatggagaatctctgtcttcttctgttcattatcagccacaggggagtgactcttcactacttcatgacaattctcgtctagatctaagtcaaaataaaggtgtatctgattacaaaggttactattccaggaacaatagtagagctgtgagtacggctaatgataactcatttcttcagccaccacatagagctatagcctcttctccttctttgaattctaatttatcgaagaatgatattctctcaccgccagaatttgatagatatcccttagtgggttccagagtcacttctatgactcaactgaaccatcatggtcgctcgccaacatcatctccaggaaacgagtcgtccgcctcattctcttctaatccgtttttgggcgagcaagatttttctccatttggtgggtatcctgcttcatcgttcccacttatgatagatgaaaaggaagaagatgattatttacacaatcctgaccccgaagaagaggcaagactggatagaaggaggttcatagatgacttcaagtacatggataaaaggtctgctagtgggctagctggtgtattgctcttgtttctggcagccatctttatttttattgttttgccagcgttgacctttaccggtgctattgatcacgaaagcaacactgaagaagttacatatttaactcaataccaatatcctcaactatccgccattagaacatctctggttgacccagacacacctgatacagcgaagacaagagaagctatggatggctctaagtgggaattagtattttctgatgagtttaatgcagaaggcagaacattttatgatggggatgatccatactggacagcccctgatgttcactatgatgctactaaggatttagaatggtacagtccagacgcttccacaactgtgaacggaaccttgcagctgagaatggatgcctttaagaaccatggcttatattacagatcaggtatgttgcagagttggaataaggtttgtttcacgcagggtgctctagaaatctctgcaaatctaccaaattatggccgtgtttcaggtttgtggcccggtctttggactatgggtaatttagggaggcccggttatttggctagtacccaaggtgtctggccttattcttatgaatcgtgtgatgctggtattacacccaaccaaagttccccggatggtatttcttacttgccgggacaaaagttaagtatttgtacttgtgatggtgaagatcatccgaatcaaggtgttggtagaggagctccagaaattgatgttttggaaggtgaaactgatactaagattggtgtaggtatagcctctcaatccttgcaaattgcaccttttgatatctggtacatgcctgactatgattttatcgaggtttacaatttcacaacaacgaccatgaacacttatgctggcggtccatttcaacaagccgtatctgctgtctcaactttgaacgtaacttggtatgaattcggtgagtacggtggctactttcaaaaatatgccattgagtatctgaacgatgacgacaatggttatatccgttggtttgttggtgatactccaacttatactattcatgctaaagccttacatcctgatggtaatattggttggagaagaatcagtaaagaaccaatgtcgattattctaaatctgggtatttccaacaattgggcttatattgattggcagtatattttcttcccagtggttatgtcgattgactatgttagaatataccaaccaagtaatgctatatccgtgacatgcgatccaagtgactatccaacatatgattatattcaatcgcacttaaatgcattccagaatgcaaacttaactacttgggaagatgctggttacacgttccctaagaatatcctaactggtaaatgtactagctcgaagttcaagttatcctcttaa

SEQ ID NO: 11724 - DNA, 2163 bp, Artificial Sequence
  Description of Artificial Sequence: Synthetic polynucleotide
atgcctttgagaaatttaactgaaacgcacaactttagtagcacaaacttggacacagatggtacaggcgacgatcatgatggtgctcctctttcctcttctccttcttttggacaacaaaatgacaatagcaccaacgataatgctggtctcacaaacccttttatggggagtgacgaagaatctaatgcgagggatggagaatctttatcttcttctgttcattatcagccacaggggagtgactcttctttacttcatgacaattctcgtttggatttgagtcaaaataaaggtgtatctgattacaaaggttactattccaggaacaatagtagagctgtgagtacggctaatgataactcttttcttcagccaccacatagagctatagcctcttctccttctttgaattctaatttatccaagaatgatattctctctccgccagaatttgatagatatcccttagtgggttccagagtcacttctatgactcaattgaaccatcatggtcgcagtccaacatcttctccaggaaacgagtcttccgcctctttctcttctaatccgtttttgggcgagcaagatttttctccatttggtgggtatcctgcttcttctttcccacttatgatagatgaaaaggaagaagatgattatttacacaatcctgaccccgaagaagaggcaagattagatagaaggaggttcatagatgacttcaagtacatggataaaaggtctgctagtgggttggctggtgtattgctcttgtttttggcagccatctttatttttattgttttgccagcgttgacctttaccggtgctattgatcacgaaagcaacactgaagaagttacatatttaactcaataccaatatcctcaattatccgccattagaacatctttggttgacccagacacacctgatacagcgaagacaagagaagctatggatggctctaagtgggaattagtattttctgatgagtttaatgcagaaggcagaacattttatgatggggatgatccatactggacagcccctgatgttcactatgatgctactaaggatttagaatggtacagtccagacgcttccacaactgtgaacggaaccttgcagttaagaatggatgcctttaagaaccatggcttatattacagatctggtatgttgcagagttggaataaggtttgtttcacgcagggtgctttggaaatctctgcaaatttaccaaattatggccgtgtttctggtttgtggcccggtctttggactatgggtaatttagggaggcccggttatttggctagtacccaaggtgtctggccttattcttatgaaagttgtgatgctggtattacacccaaccaaagttccccggatggtatttcttacttgccgggacaaaagttaagtatttgtacttgtgatggtgaagatcatccgaatcaaggtgttggtagaggagctccagaaattgatgttttggaaggtgaaactgatactaagattggtgtaggtatagcctctcaatccttgcaaattgcaccttttgatatctggtacatgcctgactatgattttatcgaggtttacaatttcacaacaacgaccatgaacacttatgctggcggtccatttcaacaagccgtatctgctgtctctactttgaacgtaacttggtatgaattcggtgagtacggtggctactttcaaaaatatgccattgagtatttgaacgatgacgacaatggttatatccgttggtttgttggtgatactccaacttatactattcatgctaaagccttacatcctgatggtaatattggttggagaagaatcagtaaagaaccaatgtctattattttgaatttgggtatttccaacaattgggcttatattgattggcagtatattttcttcccagtggttatgtctattgactatgttagaatataccaaccaagtaatgctatatccgtgacatgcgatccaagtgactatccaacatatgattatattcaatctcacttaaatgcattccagaatgcaaacttaactacttgggaagatgctggttacacgttccctaagaatatcttgactggtaaatgtactagctctaagttcaagttatcctcttga

SEQ ID NO: 11725 - DNA, 102 bp, Saccharomyces cerevisiae
atggcaacgttggattttaccactaaaccacttgcgcttgttatttacatgagtgtggtacttctattgatggtaggtgttccattacttttttcgtcttaa

SEQ ID NO: 11726 - DNA, 102 bp, Artificial Sequence
  Description of Artificial Sequence: Synthetic polynucleotide
atggcaacgttggattttaccactaaaccacttgcgcttgttatttacatgagtgtggtacttttattgatggtaggtgttccattacttttttcttcttga

SEQ ID NO: 11727 - DNA, 2709 bp, Saccharomyces cerevisiae
atgccgccagctagtactagtactaccaatgatatgataaccgaagaacctacttctccacaccaaatcccaaggcttacaaggagacttacggggtttcttccccaagaaatcaagtcaattgacacgatgattcctttaaagtcaagagcgttatggaataagcatcaagtcaaaaaatttaacaaggcagaagattttcaagatagattcattgaccatgtggaaactacattagcacgttccctatataattgtgatgacatggctgcttatgaagctgcttcgatgagtattcgtgacaatttggtcattgactggaacaaaactcagcagaaattcaccacaagagacccaaagagagtttactatttgtctttggagtttttgatgggtagggctttggataatgccctgattaatatgaagattgaagatccggaagaccctgctgcctcaaagggaaaaccaagagaaatgattaaaggggctttggatgatttaggtttcaagttagaggatgtcttggaccaagaaccggacgcaggtttaggtaatggtggtctaggtcgtcttgcagcttgcttcgtcgactcaatggcaacggaaggcatccctgcctggggttatggtctacgttatgagtatggtatctttgctcaaaagattattgacggttaccaggtggaaactccagattactggttaaattctggtaatccatgggaaattgaacgtaacgaagtgcaaattcctgtcaccttttatggttatgttgatagaccagaaggcggtaaaactacactgagtgcgtcacaatggatcggtggggaaagagttcttgctgtcgcgtatgatttcccagttccgggtttcaagacttccaatgtaaataacttaagactatggcaagcaaggccaacaacagaatttgattttgcaaaattcaataatggtgactataaaaactctgtggctcagcaacaacgcgcagagtctataaccgctgtgttgtatccaaacgataactttgctcaaggtaaggagttgaggttgaaacagcagtacttctggtgtgctgcatccttacacgacatcttaagaagattcaaaaaatccaagaggccatggactgaatttcctgaccaagtggctattcagttgaatgatactcatccaactttagccatcgttgaattacagagagttttggtcgatctagaaaaactagattggcacgaggcttgggacatcgtgaccaagacttttgcttatactaaccacactgttatgcaagaggccctggaaaaatggcccgtcggcctctttggccatttgctacccagacatttggaaattatatatgatatcaactggttcttcttgcaagatgtggccaaaaaattccccaaggatgttgatcttttgtctcgtatatccatcatcgaagaaaactctccagaaagacagatcagaatggcctttttggctattgttggttcacacaaggttaatggtgttgctgaattgcactctgaattaatcaaaacgaccatatttaaagattttgtcaagttctatggtccatcaaagtttgtcaatgtcactaacggtatcacaccaaggagatggttgaagcaagctaacccttcattggctaaactgatcagtgaaacccttaacgatccaacagaggagtatttgttggacatggccaaactgacccagttgggaaaatatgttgaagataaggagtttttgaaaaaatggaaccaagtcaagcttaataataagatcagattagtagatttaatcaaaaaggaaaatgatggagtagacatcattaacagagagtatttggacgacaccttgtttgatatgcaagttaaacgtattcatgaatataagcgtcaacagctaaacgtctttggtattatataccgttacctggcaatgaagaatatgctgaagaacggtgcttcgatcgaagaagttgccaagaaatatccacgcaaggtttcaatctttggtggtaagagtgctcctggttactacatggctaagctgatcataaaattgatcaactgtgttgctgacattgttaataacgacgagtcaattgagcatttgttgaaggttgtctttgttgctgattataatgtttctaaggctgaaatcattattccagcaagtgacttgagtgagcatatttctactgctggtactgaagcgtctggtacttctaatatgaagtttgttatgaacggtggtttgattattggtactgttgatggtgccaatgtggaaatcacaagggaaattggtgaagataatgtcttcttgtttggtaacctaagtgaaaatgtcgaagaattgagatacaaccatcaataccatccacaagatttaccatctagtttggattctgttttatcctacattgaaagtggacaattttctccagaaaatccaaatgaattcaaacctttagtcgacagtattaagtaccacggcgattattacctggtcagtgatgactttgaatcctatctggccacccatgaattagtggaccaggagttccacaatcaaaggtcagaatggttaaaaaagagtgtcctgagcgttgcaaacgtcggcttctttagcagtgatcgttgtatcgaggaatactccgataccatttggaacgttgaaccagtgacttag

SEQ ID NO: 11728 - DNA, 2709 bp, Artificial Sequence
  Description of Artificial Sequence: Synthetic polynucleotide
atgccgccagctagtactagtactaccaatgatatgataaccgaagaacctacttctccacaccaaatcccaaggcttacaaggagacttacggggtttcttccccaagaaatcaagtctattgacacgatgattcctttaaagtctagagcgttatggaataagcatcaagtcaaaaaatttaacaaggcagaagattttcaagatagattcattgaccatgtggaaactacattagcacgttccttatataattgtgatgacatggctgcttatgaagctgcttccatgagtattcgtgacaatttggtcattgactggaacaaaactcagcagaaattcaccacaagagacccaaagagagtttactatttgtctttggagtttttgatgggtagggctttggataatgccttaattaatatgaagattgaagatccggaagaccctgctgcctccaagggaaaaccaagagaaatgattaaaggggctttggatgatttaggtttcaagttagaggatgtcttggaccaagaaccggacgcaggtttaggtaatggtggtttaggtcgtcttgcagcttgcttcgtcgactccatggcaacggaaggcatccctgcctggggttatggtttacgttatgagtatggtatctttgctcaaaagattattgacggttaccaggtggaaactccagattactggttaaattctggtaatccatgggaaattgaacgtaacgaagtgcaaattcctgtcaccttttatggttatgttgatagaccagaaggcggtaaaactacattgagtgcgtctcaatggatcggtggggaaagagttcttgctgtcgcgtatgatttcccagttccgggtttcaagacttccaatgtaaataacttaagattatggcaagcaaggccaacaacagaatttgattttgcaaaattcaataatggtgactataaaaactctgtggctcagcaacaacgcgcagagtctataaccgctgtgttgtatccaaacgataactttgctcaaggtaaggagttgaggttgaaacagcagtacttctggtgtgctgcatccttacacgacatcttaagaagattcaaaaaatccaagaggccatggactgaatttcctgaccaagtggctattcagttgaatgatactcatccaactttagccatcgttgaattacagagagttttggtcgatttggaaaaattggattggcacgaggcttgggacatcgtgaccaagacttttgcttatactaaccacactgttatgcaagaggccttggaaaaatggcccgtcggcctctttggccatttgttgcccagacatttggaaattatatatgatatcaactggttcttcttgcaagatgtggccaaaaaattccccaaggatgttgatcttttgtctcgtatatccatcatcgaagaaaactctccagaaagacagatcagaatggcctttttggctattgttggttctcacaaggttaatggtgttgctgaattgcactctgaattaatcaaaacgaccatatttaaagattttgtcaagttctatggtccatctaagtttgtcaatgtcactaacggtatcacaccaaggagatggttgaagcaagctaacccttctttggctaaattaatcagtgaaacccttaacgatccaacagaggagtatttgttggacatggccaaattgacccagttgggaaaatatgttgaagataaggagtttttgaaaaaatggaaccaagtcaagcttaataataagatcagattagtagatttaatcaaaaaggaaaatgatggagtagacatcattaacagagagtatttggacgacaccttgtttgatatgcaagttaaacgtattcatgaatataagcgtcaacagttgaacgtctttggtattatataccgttacttggcaatgaagaatatgttgaagaacggtgcttctatcgaagaagttgccaagaaatatccacgcaaggtttccatctttggtggtaagagtgctcctggttactacatggctaagttaatcataaaattgatcaactgtgttgctgacattgttaataacgacgagtctattgagcatttgttgaaggttgtctttgttgctgattataatgtttctaaggctgaaatcattattccagcaagtgacttgagtgagcatatttctactgctggtactgaagcgtctggtacttctaatatgaagtttgttatgaacggtggtttgattattggtactgttgatggtgccaatgtggaaatcacaagggaaattggtgaagataatgtcttcttgtttggtaacttgagtgaaaatgtcgaagaattgagatacaaccatcaataccatccacaagatttaccatctagtttggattctgttttatcctacattgaaagtggacaattttctccagaaaatccaaatgaattcaaacctttagtcgacagtattaagtaccacggcgattattacttagtcagtgatgactttgaatcctatttggccacccatgaattagtggaccaggagttccacaatcaaaggtctgaatggttaaaaaagagtgtcttgagcgttgcaaacgtcggcttctttagcagtgatcgttgtatcgaggaatactccgataccatttggaacgttgaaccagtgacttga

SEQ ID NO: 11729 - DNA, 1974 bp, Saccharomyces cerevisiae
atgagtgataatggttcccccgcggttcttccaaaaaccgaatttaataaatacaaaatcggcaaagtgaagagtacaccagccatccagcgagatgcgaagactaacttaacatacatcaaactaagaaaaagaagtagtgagaaagtttacgggtgtacagttttccagaatcattatcgtgaggatgaaaaattaggacaaggaacatttggtgaggtttataagggaattcatttagagactcaaagacaagtggcaatgaaaaaaattatagttagcgttgaaaaagatctgtttcctataactgcacaacgagaaattactattttaaagcgtttaaaccacaaaaatattattaaactaatcgaaatggtgtatgaccattcaccggatattacaaatgcggcatccagcaacctacataagtcattctacatgatcctgccgtatatggtagcagatctgtcgggcgttttgcataatccgagaatcaacttagagatgtgcgatataaagaatatgatgctacaaatattagaaggcctaaattatattcattgtgcaaaattcatgcatagggatataaagacagcaaatattttgattgaccacaacggtgttttaaagcttgctgattttggtttagcaagattatattatggctgtcctccaaacttaaagtatcctggtggtgcaggttccggcgccaaatatacatcagtagtcgtaacgagatggtatagagcacctgagttggtgcttggtgataaacagtatacaacagctgttgatatatggggtgtcggatgcgttttcgcagaattttttgagaaaaaacctattttacagggaaaaacggatattgatcagggacatgttattttcaaactacttggtacaccgacagaagaagattgggccgtggctagatatttgccaggtgctgaactaacaacaactaattacaagccaacgttgagggaaagatttggtaaatatctaagtgaaacaggtctagattttttaggacagttgttagcgttagatccttacaagaggttgaccgctatgtctgctaaacaccatccttggtttaaagaggaccctttaccatcagagaagataacattaccgacggaagaaagtcatgaagctgatattaagaggtacaaggaagaaatgcaccaatcattgtcccaaagagtacctactgcgccaagaggtcatatagttgaaaagggtgaatcacctgtcgtgaaaaatcttggggcgatcccaagaggccccaagaaagatgacgcaagttttttgcctccatcaaagaacgtattggctaagccgcctccttcgaaaataagagaactacatcaaaatcctagaccgtatcatgtgaacagcggatatgctaaaactgcgattccaccgccagcagcccctgcaggagttaatagatacggacccaacaatagttccagaaataatcgcttcagcggcaacagcactgcacccaacaacagcaggaatcccgtaaatcgatttcatcctgagacaaatgtcagctctaaatataataaagtacctttgccattggggcctcagtcaagataccagggtaattcaaatgagtcccggtacaaaaactcgccaaatgactctagatatcataaccctaggtacgtgaacaagccggaaaccaacttcaataggcaaccacagaaatatagtcgccaagaatccaatgcgccaatcaataaaaattataatccttcaaacggttctcgcaatatggctggtgatcatcatcaaggctcgagaccttctcatccacaattcccaatctcgccctcacaggggcagcatcagcttacgagtaaaccaatagagaaaaaaaatggaagctttaaggatgaaagagcgaaaccagatgagtctaaggagttccaaaatagtgatattgcagatctatattag

SEQ ID NO: 11730 - DNA, 1974 bp, Artificial Sequence
  Description of Artificial Sequence: Synthetic polynucleotide
atgagtgataatggttcccccgcggttcttccaaaaaccgaatttaataaatacaaaatcggcaaagtgaagagtacaccagccatccagagagatgcgaagactaacttaacatacatcaaattgagaaaaagaagtagtgagaaagtttacgggtgtacagttttccagaatcattatcgtgaggatgaaaaattaggacaaggaacatttggtgaggtttataagggaattcatttagagactcaaagacaagtggcaatgaaaaaaattatagttagcgttgaaaaagatttatttcctataactgcacaaagagaaattactattttaaagcgtttaaaccacaaaaatattattaaattaatcgaaatggtgtatgaccattctccggatattacaaatgcggcatccagcaacttacataagagtttctacatgatcttaccgtatatggtagcagatttaagtggcgttttgcataatccgagaatcaacttagagatgtgcgatataaagaatatgatgttacaaatattagaaggcttgaattatattcattgtgcaaaattcatgcatagggatataaagacagcaaatattttgattgaccacaacggtgttttaaagcttgctgattttggtttagcaagattatattatggctgtcctccaaacttaaagtatcctggtggtgcaggttccggcgccaaatatacatctgtagtcgtaacgagatggtatagagcacctgagttggtgcttggtgataaacagtatacaacagctgttgatatatggggtgtcggatgcgttttcgcagaattttttgagaaaaaacctattttacagggaaaaacggatattgatcagggacatgttattttcaaattacttggtacaccgacagaagaagattgggccgtggctagatatttgccaggtgctgaattaacaacaactaattacaagccaacgttgagggaaagatttggtaaatatttgagtgaaacaggtttggattttttaggacagttgttagcgttagatccttacaagaggttgaccgctatgtctgctaaacaccatccttggtttaaagaggaccctttaccaagtgagaagataacattaccgacggaagaaagtcatgaagctgatattaagaggtacaaggaagaaatgcaccaatctttgtcccaaagagtacctactgcgccaagaggtcatatagttgaaaagggtgaatctcctgtcgtgaaaaatcttggggcgatcccaagaggccccaagaaagatgacgcaagttttttgcctccatctaagaacgtattggctaagccgcctccttccaaaataagagaattacatcaaaatcctagaccgtatcatgtgaacagcggatatgctaaaactgcgattccaccgccagcagcccctgcaggagttaatagatacggacccaacaatagttccagaaataatcgcttcagcggcaacagcactgcacccaacaacagcaggaatcccgtaaatagatttcatcctgagacaaatgtcagctctaaatataataaagtacctttgccattggggcctcagtctagataccagggtaatagtaatgagtccagatacaaaaactctccaaatgactctagatatcataaccctaggtacgtgaacaagccggaaaccaacttcaataggcaaccacagaaatatagtcgccaagaatccaatgcgccaatcaataaaaattataatccttccaacggttctcgcaatatggctggtgatcatcatcaaggctccagaccttctcatccacaattcccaatctccccctctcaggggcagcatcagcttacgagtaaaccaatagagaaaaaaaatggaagctttaaggatgaaagagcgaaaccagatgagtctaaggagttccaaaatagtgatattgcagatttatattga

SEQ ID NO: 11731 - DNA, 1590 bp, Saccharomyces cerevisiae
atgactataagcgaagctcgtctatcaccgcaagtcaatcttctcccaataaagaggcactcaaacgaagaggtagaggagactgcagcgattctaaaaaagcgtactatagataatgaaaagtgtaaagacagcgaccctggttttggttcccttcaaagaaggttactgcagcaactttatggcacacttcctacggacgaaaagataatcttcacatatttacaagattgtcaacaagagatcgatagaatcattaaacaatccattattcagaaagagagtcattcagtaattctcgtggggcccagacaaagttacaaaacatacttattagactatgaactgtctttgttgcaacaatcttataaagagcagtttataactatcaggttgaatgggtttattcactccgaacaaacagctattaacggtatagcaactcaattggaacagcagttgcagaaaattcatggcagtgaagaaaaaattgacgatacttcattagagactattagcagtggttctttgacagaagtgtttgagaaaattcttttactcttagattcgaccacgaagacaagaaatgaagatagtggtgaggttgacagagagagtataacaaagataacagttgtttttatattcgatgaaattgatacatttgctgggcctgtgaggcaaactttattatacaatctttttgacatggtagaacattctcgggtacctgtttgcatttttggctgcacaacgaaattaaatatcttggaatatttagaaaagagggtaaagagtagattttctcaaagagtgatttatatgccgcaaatacagaatctagacgatatggttgacgccgtcagaaatttacttacagttcgctctgaaatctccccctgggtttcacaatggaatgaaacgttggaaaaagaactatccgaccctcgatcgaatttgaatagacatattaggatgaatttcgaaacctttaggtcattacctacattgaaaaatagcataattccattagtagcgacatccaaaaattttggttcactctgcactgccataaaatcgtgttcttttcttgacatatacaataagaaccaactatctaataatttaacaggaaggctccaatctttatccgatttagagttagccattttgatctcagccgctagggttgccttaagggcgaaagacggatcttttaattttaatttagcttatgcagagtatgaaaagatgattaaagctatcaactccagaattcccaccgtggctcctactacaaatgtgggaacaggtcaaagtactttttctatcgacaatactatcaaactatggttgaaaaaggacgtcaagaacgtttgggaaaatttagtgcaactggatttttttaccgagaaatcagccgttggtttgagagataatgcgaccgcagcattttacgctagcaattatcaatttcagggcaccatgatcccgtttgacttgagaagttaccagatgcagatcattcttcaggaattaagaagaattatccccaaatctaatatgtactactcctggacacaactgtga

SEQ ID NO: 11732 - DNA, 1590 bp, Artificial Sequence
  Description of Artificial Sequence: Synthetic polynucleotide
atgactataagcgaagctcgtttatctccgcaagtcaatcttctcccaataaagaggcactccaacgaagaggtagaggagactgcagcgattttgaaaaagcgtactatagataatgaaaagtgtaaagacagcgaccctggttttggttcccttcaaagaaggttattgcagcaactttatggcacacttcctacggacgaaaagataatcttcacatatttacaagattgtcaacaagagatcgatagaatcattaaacaatccattattcagaaagagagtcattctgtaattctcgtggggcccagacaaagttacaaaacatacttattagactatgaattatctttgttgcaacaatcttataaagagcagtttataactatcaggttgaatgggtttattcactccgaacaaacagctattaacggtatagcaactcaattggaacagcagttgcagaaaattcatggcagtgaagaaaaaattgacgatacttctttagagactattagcagtggttctttgacagaagtgtttgagaaaattcttttactcttagattctaccacgaagacaagaaatgaagatagtggtgaggttgacagagagagtataacaaagataacagttgtttttatattcgatgaaattgatacatttgctgggcctgtgaggcaaactttattatacaatctttttgacatggtagaacattctagagtacctgtttgcatttttggctgcacaacgaaattaaatatcttggaatatttagaaaagagggtaaagagtagattttctcaaagagtgatttatatgccgcaaatacagaatttggacgatatggttgacgccgtcagaaatttacttacagttcgctctgaaatctccccctgggtttctcaatggaatgaaacgttggaaaaagaattatccgaccctcgttccaatttgaatagacatattaggatgaatttcgaaacctttaggtctttacctacattgaaaaatagcataattccattagtagcgacatccaaaaattttggttctctctgcactgccataaaaagttgttcttttcttgacatatacaataagaaccaattatctaataatttaacaggaaggctccaatctttatccgatttagagttagccattttgatcagtgccgctagggttgccttaagggcgaaagacggatcttttaattttaatttagcttatgcagagtatgaaaagatgattaaagctatcaactccagaattcccaccgtggctcctactacaaatgtgggaacaggtcaaagtactttttctatcgacaatactatcaaattatggttgaaaaaggacgtcaagaacgtttgggaaaatttagtgcaattggatttttttaccgagaaaagtgccgttggtttgagagataatgcgaccgcagcattttacgctagcaattatcaatttcagggcaccatgatcccgtttgacttgagaagttaccagatgcagatcattcttcaggaattaagaagaattatccccaaatctaatatgtactactcctggacacaattgtga

SEQ ID NO: 11733 - DNA, 1311 bp, Saccharomyces cerevisiae
atggctccaccaaagaaaaccgtaaagaagatggaccttacgtcatttttaaatgatgacacctttggttcatcttgggctgaagaagatgtcgatttgaataagatcacaattcctattgaaaccgctaatgcaaacactattccattgtccgaattggctcatgctaaaaacaacagcaataacacgcgttcaggcggctttggtggcagttttggaggtagatctagattagaccctgctttggggggcggttcttccgatagaagagaggaataccctgttccagatgctccaccatatagggctgtcataaacaacattccatgggatattaccccagagggtgttcaagcctgggttgaagatggtttagttaagcctgaagcggttgaagaagttgttttgccaaagaatctaagagacccaacaagattaaagggtaatgctttcgttactttgaaagaaagagcagatttggtcgccgttctgaagttcaacggtactaaattgaatgagagaactgtttacgtttctgttgcggctccaagaagagggggaggtgcagatgttgattggagtagtgctagaggctccaatttccaaggtgatggaagagaagatgcaccagatcttgattggggtgccgctagaggttctaacttcagaggtccaagaagagaaagagaagaagttgatattgactggactgctgcaagaggttccaatttccaaggctcttccagaccaccaagaagagaaagagaagaagttgatatcgactggagcgctgcaagaggctccaatttccaaggctcttccagaccaccaagaagagaaagagaagagccagatattgactggagtgcagctagaggctctaactttcaaagctcctcgaggccaccaagaagagaaagagaagagccagatattgactggagtgcagccagaggttccaacttccaaagctcctcaagaccaccaagaagagaaagagaaaaggaagaaccagctttggattggggtgctgccagaggtgctcagtttggtaagcctcaacaaaccaaaaatacctacaaggataggtctctaactaacaaaaagactactgatgagcaaccaaaaatccagaagtctgtttatgatgttttacgtactgaagatgatgatgaagatgaagaggctgaaaagcaaaatggagacgcaaaagaaaacaaagttgatgcggcagttgaaaagctacaggataaaactgctcaattgactgttgaagatggtgacaattgggaagttgttggtaagaaatag

SEQ ID NO: 11734 - DNA, 1311 bp, Artificial Sequence
  Description of Artificial Sequence: Synthetic polynucleotide
atggctccaccaaagaaaaccgtaaagaagatggaccttacgtcttttttaaatgatgacacctttggttcttcttgggctgaagaagatgtcgatttgaataagatcacaattcctattgaaaccgctaatgcaaacactattccattgtccgaattggctcatgctaaaaacaacagcaataacacgcgtagcggcggctttggtggcagttttggaggtagatctagattagaccctgctttggggggcggttcttccgatagaagagaggaataccctgttccagatgctccaccatatagggctgtcataaacaacattccatgggatattaccccagagggtgttcaagcctgggttgaagatggtttagttaagcctgaagcggttgaagaagttgttttgccaaagaatttaagagacccaacaagattaaagggtaatgctttcgttactttgaaagaaagagcagatttggtcgccgttttgaagttcaacggtactaaattgaatgagagaactgtttacgtttctgttgcggctccaagaagagggggaggtgcagatgttgattggagtagtgctagaggctccaatttccaaggtgatggaagagaagatgcaccagatcttgattggggtgccgctagaggttctaacttcagaggtccaagaagagaaagagaagaagttgatattgactggactgctgcaagaggttccaatttccaaggctcttccagaccaccaagaagagaaagagaagaagttgatatcgactggagcgctgcaagaggctccaatttccaaggctcttccagaccaccaagaagagaaagagaagagccagatattgactggagtgcagctagaggctctaactttcaaagctccagcaggccaccaagaagagaaagagaagagccagatattgactggagtgcagccagaggttccaacttccaaagctccagcagaccaccaagaagagaaagagaaaaggaagaaccagctttggattggggtgctgccagaggtgctcagtttggtaagcctcaacaaaccaaaaatacctacaaggataggtctttgactaacaaaaagactactgatgagcaaccaaaaatccagaagtctgtttatgatgttttacgtactgaagatgatgatgaagatgaagaggctgaaaagcaaaatggagacgcaaaagaaaacaaagttgatgcggcagttgaaaagttacaggataaaactgctcaattgactgttgaagatggtgacaattgggaagttgttggtaagaaatga

SEQ ID NO: 11735 - DNA, 4224 bp, Saccharomyces cerevisiae
atgctaggtttgcgaactcatggtttagacaggtatgaacattatattcgtcgcccgtcggattttggcaaacttgagctgcaagattggttgaatcataagtcattccgagtttcccccaatttattaattgattcaagcaccacacgtgagtggaatgaacctgagcttttttatcaaaataccgaggatgaaacttgggtgagaccttgtgtagggccaaagctagaaccatcaatgatgatgctcagatatcacgattcgaatattggtcaaatgcctcaattttgttatccaatctcaagtccgataaattttaaaccagtattaaaatacattttgcaagaacgttctgaactgtcagacggcttccctcaaaagtataacacactaataggtagtctttttgacattgataaaaacccagaaaccttagatgattcagatatagaagcattggatgacatagaaatgagcagtgacagcggtaatgttaaagaaccaaaaattgaattgcaggcgctggaagaaatccaacaaaagcatttcagtttaatagtatccaacaatggaatctttcaaacaggtagcacttcaataacatacatacagtctggcatatctggcagcatagctataaaacccaacaacgttgcaattttaatattactcactcaaccaagtggtcacttattgtctattttaccgcttgatgacggtaaagagacatatttgctacaatattggaacctgggacaaaaaggtcagtggaacataatcaagcaccaaaacgagaagcagtttgttcttatacataaggaactaggcatttgcaaattttttgaattccatttaccatttacttttcaattagtaaacaatttaacattgaccgattccgtgattatgaacggatcctttttcccaacaaattacactgatttagatccctatttcattatatttataacagccataagatatgaaaggatagtctactttgtcatagaatggaacaacaacgaaataaagaaaaaagaggtatatcaattgacagtatttgatggtgagaagactaatatgacaatacccattggactaaatgcatgtttagtcgaaacacccctaaagttctctttagtttctgcaaatcaaattatgtcaggagagactgaattccactcattccaattgaaggctctcaagggaatcaagtcattttttccagctcctttattgttattaaaattacaagaactacacccacatacatttaaaaaattccaatattgtaccataatatcctcctcgacaggaaatatttgtttttgcgtcaccgaacgatcgacaatagtaaatggtaatttaaaattttacgagctaactaggttcaaaggattgaaatccatttcaccactaccttcaaatccgataaatttagactccagatcctcaagttatgtactggtggtcataagttttagtagaacattagagctaacattatctctagaagatttgagatgtttagataaaaaagacgttattaagcctttgaaaaatatcaccttcaagcacacaattgatagttccacagaggagaactctcaaattttagcatttacgtcttctaaattttataacacacacacaggctctaacatcaatgacacgagaaattctcaagtttggcttacctcaccaaatgcaataactcaaccttgcattgattataaactcaggaaaactcatcaacttatccacttaaagcaatttcaaatttttagacatcttaggatatggaaatgtaagaaccttgatattgctctgttacagagacttggaataaaccagtcaaataccgaaagttcgttaatttttgcgaccgacgctgtttctaacaacagaatatttttattagatttaactatgacaacgacaatcgataatgatgatcccgttcaaggactgataaatatagaagatttactatgtgatactgaaaacgaaactatccttctaaattttacgaaaaataacttgattcaagtaactagggatacgatatacatcgatcccattggtggggacaaagagttgcgtaagatttctccaggttgggaattcgaaaacgttacatacaatgatggtattttaatagtttggaatgctgggcttggctgtgtctcttatattgaaaatatagacgctgttgatgagtctggcgccttagtttcaaacttaagcagcagcaaaggcatgagcaagttcttcaagcagttaggaactgtcacgagtgtcaattttcaaatcaaagagtctacagatgatccaaccaagtatgacatttggatccttttaccagactgtgtcattcgtacacccttttctgactggattagtgattcacttgatttttctgatgtgtatattttgagtgttcagcaggcgttaataaacggcccttatttttgctctctcgattatgaatcatattttgaggtgcacactttacagaacaactgcttcaaaaaaggatccagatgtacaagcagagttaattttcaagggaaagatattaaatttagaagctttggtgtgaatcaatgtttggcatttagtgcatttgaaatttttgtcatcaatttaacgccaattcacgacagtagagaattggatttttacaagctaaaattaccgcacctaggtaataacaattcaattcttgaagtctgtccggacatagaaaacaaccaattattcatactctactctgatggcttaagaatcctcgaactatcatacctaacatcaaataatggaaatttcttattaaaatctacaagaagcaaaaataagaaatttttatatctagacaaaataaatcgaatgctggtattgaatcaggacttgagggaatgggagtgtattagactatcagatggtaaggcagttggtttagattctcaacttcttaaggatgattctgaagaaatcctagaaataaaggaattaccaatagcaacagaggacaatcctttagaaaagaaaactgtattattgatctcttttactagctcattaaaactagttttattaactgctgcaaaaaacaaaatttccaatcaaataatagattcgtataaacttgacaattcaagactcctcaatcatttggtcattactcccagaggtgaaatattctttctggattataaagttatgggcaccgataacgaaatgtcctttaacaagttgaaagtcacaaaacattgcattgaccaggaggagagaaataatacgactttgcggctcactttggaaacccggtttacatttaagagttggagtacagttaagacgtttactgtagtaggcgataatatcattgctaccacaaatatgggcgaaaagctctacttgattaaggatttctcttcatcatctgacgaatcgagaagggtgtatcccttggaaatgtatcctgattcaaaagttcaaaagataataccattaaatgaatgctgctttgttgttgccgcttactgtggaaataggaacgatttagattcaagattaattttttactctttacccaccatcaaagttgggcttaataacgaaacaggcagcctaccagatgaatatgggaatgggagagtcgacgacatattcgaggttgactttcctgaaggatttcaatttggcactatggctttgtatgatgttttacatggtgagaggcacgtaaatcgttacagcgaaggcatacggtcggagaatgacgaagcagaggttgccctaaggcagcgtagaaatttactactcttttggcgaaaccactcttctacaccaaaaccttcactacgccgagccgccactatagtatatgaggatcatgtatcatcccgttattttgaggatataagttctatattaggaagcactgcaatgagaactaaaagactatctccctataatgcggtagcattggacaagcctattcaagatattagttacgatcccgcagtacaaactttatatgtgctaatggcagatcaaacaattcacaaattcggcaaggacaggttgccttgccaggacgaatacgaaccaagatggaattctggctatttggtttcaagaaggtcaatagttaaatctgacctcatctgtgaggttgggttatggaaccttagcgataactgcaagaacacagtataa

SEQ ID NO: 11736 - DNA, 4224 bp, Artificial Sequence
  Description of Artificial Sequence: Synthetic polynucleotide
atgttgggtttgagaactcatggtttagacaggtatgaacattatattcgtcgcccgagtgattttggcaaacttgagttacaagattggttgaatcataagagtttcagagtttcccccaatttattaattgattctagcaccacacgtgagtggaatgaacctgagcttttttatcaaaataccgaggatgaaacttgggtgagaccttgtgtagggccaaagttggaaccaagcatgatgatgctcagatatcacgattctaatattggtcaaatgcctcaattttgttatccaatctccagtccgataaattttaaaccagtattaaaatacattttgcaagaacgttctgaattaagtgacggcttccctcaaaagtataacacattaataggtagtctttttgacattgataaaaacccagaaaccttagatgattctgatatagaagcattggatgacatagaaatgagcagtgacagcggtaatgttaaagaaccaaaaattgaattgcaggcgttagaagaaatccaacaaaagcatttcagtttaatagtatccaacaatggaatctttcaaacaggtagcacttccataacatacatacagtctggcatatctggcagcatagctataaaacccaacaacgttgcaattttaatattactcactcaaccaagtggtcacttattgtctattttaccgcttgatgacggtaaagagacatatttgttgcaatattggaacttgggacaaaaaggtcagtggaacataatcaagcaccaaaacgagaagcagtttgttcttatacataaggaattaggcatttgcaaattttttgaattccatttaccatttacttttcaattagtaaacaatttaacattgaccgattccgtgattatgaacggatcctttttcccaacaaattacactgatttagatccctatttcattatatttataacagccataagatatgaaaggatagtctactttgtcatagaatggaacaacaacgaaataaagaaaaaagaggtatatcaattgacagtatttgatggtgagaagactaatatgacaatacccattggattgaatgcatgtttagtcgaaacacccttgaagttctctttagtttctgcaaatcaaattatgtctggagagactgaattccactctttccaattgaaggctctcaagggaatcaagagcttttttccagctcctttattgttattaaaattacaagaattgcacccacatacatttaaaaaattccaatattgtaccataatatcctcctctacaggaaatatttgtttttgcgtcaccgaaagatctacaatagtaaatggtaatttaaaattttacgagttaactaggttcaaaggattgaaatccatttctccattgccttccaatccgataaatttagactccagatcctccagttatgtattggtggtcataagttttagtagaacattagagttgacattatctttggaagatttgagatgtttagataaaaaagacgttattaagcctttgaaaaatatcaccttcaagcacacaattgatagttccacagaggagaactctcaaattttagcatttacgtcttctaaattttataacacacacacaggctctaacatcaatgacacgagaaattctcaagtttggcttacctctccaaatgcaataactcaaccttgcattgattataaactcaggaaaactcatcaacttatccacttaaagcaatttcaaatttttagacatcttaggatatggaaatgtaagaaccttgatattgctttattacagagacttggaataaaccagtctaataccgaaagttctttaatttttgcgaccgacgctgtttctaacaacagaatatttttattagatttaactatgacaacgacaatcgataatgatgatcccgttcaaggattgataaatatagaagatttattatgtgatactgaaaacgaaactatccttttgaattttacgaaaaataacttgattcaagtaactagggatacgatatacatcgatcccattggtggggacaaagagttgcgtaagatttctccaggttgggaattcgaaaacgttacatacaatgatggtattttaatagtttggaatgctgggcttggctgtgtctcttatattgaaaatatagacgctgttgatgagtctggcgccttagtttctaacttaagcagcagcaaaggcatgagcaagttcttcaagcagttaggaactgtcacgagtgtcaattttcaaatcaaagagtctacagatgatccaaccaagtatgacatttggatccttttaccagactgtgtcattcgtacacccttttctgactggattagtgattctcttgatttttctgatgtgtatattttgagtgttcagcaggcgttaataaacggcccttatttttgctctctcgattatgaaagttattttgaggtgcacactttacagaacaactgcttcaaaaaaggatccagatgtacaagcagagttaattttcaagggaaagatattaaatttagaagctttggtgtgaatcaatgtttggcatttagtgcatttgaaatttttgtcatcaatttaacgccaattcacgacagtagagaattggatttttacaagttgaaattaccgcacttgggtaataacaattctattcttgaagtctgtccggacatagaaaacaaccaattattcatactctactctgatggcttaagaatcctcgaattatcttacttgacaagtaataatggaaatttcttattaaaatctacaagaagcaaaaataagaaatttttatatttggacaaaataaatagaatgttggtattgaatcaggacttgagggaatgggagtgtattagattaagtgatggtaaggcagttggtttagattctcaacttcttaaggatgattctgaagaaatcttggaaataaaggaattaccaatagcaacagaggacaatcctttagaaaagaaaactgtattattgatctcttttactagctctttaaaattggttttattaactgctgcaaaaaacaaaatttccaatcaaataatagattcttataaacttgacaattctagactcctcaatcatttggtcattactcccagaggtgaaatattctttttggattataaagttatgggcaccgataacgaaatgtcctttaacaagttgaaagtcacaaaacattgcattgaccaggaggagagaaataatacgactttgaggctcactttggaaaccagatttacatttaagagttggagtacagttaagacgtttactgtagtaggcgataatatcattgctaccacaaatatgggcgaaaagctctacttgattaaggatttctcttcttcttctgacgaatctagaagggtgtatcccttggaaatgtatcctgattctaaagttcaaaagataataccattaaatgaatgctgctttgttgttgccgcttactgtggaaataggaacgatttagattccagattaattttttactctttacccaccatcaaagttgggcttaataacgaaacaggcagcttgccagatgaatatgggaatgggagagtcgacgacatattcgaggttgactttcctgaaggatttcaatttggcactatggctttgtatgatgttttacatggtgagaggcacgtaaatcgttacagcgaaggcataaggagtgagaatgacgaagcagaggttgccttaaggcagcgtagaaatttacttctcttttggagaaaccactcttctacaccaaaaccttctttacgccgtgccgccactatagtatatgaggatcatgtatcttcccgttattttgaggatataagttctatattaggaagcactgcaatgagaactaaaagattatctccctataatgcggtagcattggacaagcctattcaagatattagttacgatcccgcagtacaaactttatatgtgttgatggcagatcaaacaattcacaaattcggcaaggacaggttgccttgccaggacgaatacgaaccaagatggaattctggctatttggtttctagaaggtctatagttaaatctgacctcatctgtgaggttgggttatggaaccttagcgataactgcaagaacacagtatga

SEQ ID NO: 11737 - DNA, 630 bp, Saccharomyces cerevisiae
atgtcacaacaagttggtaacagtatcagaagaaagctggtaatcgttggtgatggtgcctgtggtaagacatgtttattaatcgtcttttccaagggccaatttccagaagtctacgtaccaactgtctttgaaaactatgtagcagatgttgaagttgatgggcgtcgtgtagagctagcgctatgggataccgctggtcaagaagattatgatagactaagaccattgtcatacccagactccaatgtcgtattaatttgtttctctatcgatcttccagattctttagagaatgtacaagaaaaatggattgccgaagtattacatttctgtcaaggtgtgccaattattcttgttggttgtaaagtggatttgagaaacgacccacaaaccattgaacaattaagacaagaaggtcaacaacccgttacatcacaggagggacaatctgtagcagaccagattggcgcaaccggatactacgaatgttcggccaagactggttatggtgtcagagaagtgtttgaggccgccactagagcttcattgatgggtaaatctaaaacgaatggtaaagctaagaagaacactactgaaaagaagaagaagaagtgtgtcttgttatag

SEQ ID NO: 11738 - DNA, 630 bp, Artificial Sequence
  Description of Artificial Sequence: Synthetic polynucleotide
atgtctcaacaagttggtaacagtatcagaagaaagttggtaatcgttggtgatggtgcctgtggtaagacatgtttattaatcgtcttttccaagggccaatttccagaagtctacgtaccaactgtctttgaaaactatgtagcagatgttgaagttgatgggcgtcgtgtagagttagcgctttgggataccgctggtcaagaagattatgatagattgagaccattgagttacccagactccaatgtcgtattaatttgtttctctatcgatcttccagattctttagagaatgtacaagaaaaatggattgccgaagtattacatttctgtcaaggtgtgccaattattcttgttggttgtaaagtggatttgagaaacgacccacaaaccattgaacaattaagacaagaaggtcaacaacccgttacatctcaggagggacaatctgtagcagaccagattggcgcaaccggatactacgaatgttctgccaagactggttatggtgtcagagaagtgtttgaggccgccactagagcttctttgatgggtaaatctaaaacgaatggtaaagctaagaagaacactactgaaaagaagaagaagaagtgtgtcttgttatga

SEQ ID NO: 11739 - DNA, 348 bp, Saccharomyces cerevisiae
atgggtaatttcagatttcctataaaaaccaagctaccaccagggtttatcaatgctcgcatacttagggataacttcaaaagacaacaatttaaagagaatgaaatccttgttaaatctttgaaattcatcgctagaaatatgaaccttccaacaaaactgaggttggaggctcagttaaaactaaatgcattgccaaactacatgagatctacgcagatcaaaaataggtgcgtggactctggacatgcaagatttgttctaagtgattttaggttgtgtaggtatcaatttagagaaaacgctctgaagggtaatttgccaggtgttaagaagggtatttggtaa

SEQ ID NO: 11740 - DNA, 348 bp, Artificial Sequence
  Description of Artificial Sequence: Synthetic polynucleotide
atgggtaatttcagatttcctataaaaaccaagttaccaccagggtttatcaatgctcgcatacttagggataacttcaaaagacaacaatttaaagagaatgaaatccttgttaaatctttgaaattcatcgctagaaatatgaaccttccaacaaaattgaggttggaggctcagttaaaattgaatgcattgccaaactacatgagatctacgcagatcaaaaataggtgcgtggactctggacatgcaagatttgttttgagtgattttaggttgtgtaggtatcaatttagagaaaacgctttgaagggtaatttgccaggtgttaagaagggtatttggtga

SEQ ID NO: 11741 - DNA, 786 bp, Saccharomyces cerevisiae
atgaagacctatcatttgaataatgatataattgtcacacaagaacagttggatcattggaatgaacaactaatcaagctggaaacgccacaggagattattgcatggtctatcgtaacgtttcctcaccttttccaaaccactgcatttggtttgactggcttggttactatcgatatgttgtcaaagctatctgaaaaatactacatgccagaactattatttatagacactttgcaccatttcccacaaactttaacactaaaaaacgagattgagaaaaaatactaccagcctaaaaatcaaaccattcacgtatataagccggatggatgtgaatcggaggcagattttgcctcgaaatacggggatttcttatgggagaaagatgatgacaagtacgattatctggccaaagtggaacctgcacatcgtgcctacaaagagctacatataagtgctgtgtttactggtagaagaaaatcacaaggttctgcccgctcccaactgtcgattattgaaatagacgaacttaatggaatcttaaaaataaatccattgatcaattggacgttcgagcaggttaaacagtatatagatgcaaacaatgtaccatacaacgaacttttggaccttggatatagatccattggtgattaccattccacacaacccgtcaaggaaggtgaagatgagagagcaggaagatggaagggcaaggccaagaccgagtgtggaattcatgaagccagccgattcgcgcaatttttaaagcaagatgcctag

SEQ ID NO: 11742 - DNA, 786 bp, Artificial Sequence
  Description of Artificial Sequence: Synthetic polynucleotide
atgaagacctatcatttgaataatgatataattgtcacacaagaacagttggatcattggaatgaacaattgatcaagttggaaacgccacaggagattattgcatggtctatcgtaacgtttcctcaccttttccaaaccactgcatttggtttgactggcttggttactatcgatatgttgtccaagttatctgaaaaatactacatgccagaattattatttatagacactttgcaccatttcccacaaactttaacattaaaaaacgagattgagaaaaaatactaccagcctaaaaatcaaaccattcacgtatataagccggatggatgtgaaagtgaggcagattttgcctccaaatacggggatttcttatgggagaaagatgatgacaagtacgattatttggccaaagtggaacctgcacatcgtgcctacaaagagttacatataagtgctgtgtttactggtagaagaaaatctcaaggttctgcccgctcccaattatccattattgaaatagacgaacttaatggaatcttaaaaataaatccattgatcaattggacgttcgagcaggttaaacagtatatagatgcaaacaatgtaccatacaacgaacttttggaccttggatatagatccattggtgattaccattccacacaacccgtcaaggaaggtgaagatgagagagcaggaagatggaagggcaaggccaagaccgagtgtggaattcatgaagccagcaggttcgcgcaatttttaaagcaagatgcctga

SEQ ID NO: 11743 - DNA, 474 bp, Saccharomyces cerevisiae
atgaatggaaacagcactaacaatgaacaattgcagcaagaactggccactactcaagaccaagtggcttcgattattgagtccttcgttgaattaggtgtctcgatatatgattttcctggtactccagaagccaccaagggaatgatcaccaacttgcaaagaaatgtggatcgcttgtacaagctgaacgtgagaagcaacgatcctcaatccagcttgtctaaggtggacattcccttggaagttgttcaatacattgaggacggtagaaatccagatatttacacaagagagttcgtggaagccataagaagatccaaccaatatcaaagaggcaagatgcatggattgaagcaattaagagattcacttgctgacaagattgtggatgaatttccagagttgaaagaacctgttgaagatattataaagagaacatctcccattgacaatgtctccaatactcactaa

SEQ ID NO: 11744 - DNA, 474 bp, Artificial Sequence
  Description of Artificial Sequence: Synthetic polynucleotide
atgaatggaaacagcactaacaatgaacaattgcagcaagaattggccactactcaagaccaagtggcttccattattgagtccttcgttgaattaggtgtcagtatatatgattttcctggtactccagaagccaccaagggaatgatcaccaacttgcaaagaaatgtggatcgcttgtacaagttgaacgtgagaagcaacgatcctcaatccagcttgtctaaggtggacattcccttggaagttgttcaatacattgaggacggtagaaatccagatatttacacaagagagttcgtggaagccataagaagatccaaccaatatcaaagaggcaagatgcatggattgaagcaattaagagattctcttgctgacaagattgtggatgaatttccagagttgaaagaacctgttgaagatattataaagagaacatctcccattgacaatgtctccaatactcactga

SEQ ID NO: 11745 - DNA, 1479 bp, Saccharomyces cerevisiae
atggcaaagagcaaaaaaaaaacagatgttgtcgattcaacaaacctgcccattctagaattactatcattaaaagctcccattttccagtctcttttacatcctgaactgcccattataataactggctttggtacaggacatattgtgtgccatcgttatgaccccgctaagttgcaatcgcacctagatcgtagacgtagaattgacactgcaactacaggcaaggatgcaaagaaaggtgtatgcccttggattagattagatatagacctagaaactggagatttgaaatttgttgatattgaagaacaacagcaacaaaagcaaacaggaaaagatgaagacttgggcgtaaaaacactttggaagactaaaagacataaaggtagtgtccgtgccatgtgctttgattctaaaggtgacaatattttttctgttggatcggataatgttttaaaaaaggccaatactatgaccggcaaagtcgtcaaaaaggtaaacttaagctcactgtttaattctgaagagaaaaaaaatgataaatttacgaaattatgcgcctctcaaactcacccattcattttaataggcgatgaatccggtaatatacacgtaataaactcggaaaacttggcattatcaaattccattcgttcgatacattttggcgactctatcaacgatattttccactttgataaaagatctgcatataaattcatttctttgggccagacaacgttagcttattttgacgttcgcgacaaagatgccaaaccgaacgtagctggaaacgaggatggtaaaattttgatcagcgatgatcaggaggacgaagttctttgtggttgtttcgtcgatcccgaagtagcagatacccttttgtgtgggatgggcgagggtattgttaccgtctggaaaccgaataagaatgatttggaagatcaaatgagccgtattaaaattagcaaagatgaaagtatcgattgcattgttcctactttacaagatgataactgtgtatggtgtggttgttccaatggtaacatttataaagtaaatgccaaattgggaaaagtcgtcgagataagaaaccacagtgaattggatgaagtcagttttgttgatctagattttgaataccgtgttgtttctggtggtttggaaaacatcaagatatgggaattatcgagtgatgatgtagaggaaaatgcatcggtagagtccgatagcgacgaacccctctcccactctgatgaggatctaagtgatgacactagttctgatgatgaaacgacgcttgtcgggctctcaaaggaagagctattagacgaattagataaggacctcaaggaagatcatcaagaggaaaaagaatccaactcaaaatctgtcaaaaaaagaaaaataatgaaggagaacaacaaaaaaaaggacctgtatgagcatgggatcaagaagtttgatgatttatag

SEQ ID NO: 11746 - DNA, 1479 bp, Artificial Sequence
  Description of Artificial Sequence: Synthetic polynucleotide
atggcaaagagcaaaaaaaaaacagatgttgtcgattctacaaacttgcccattttggaattattatctttaaaagctcccattttccagtctcttttacatcctgaattgcccattataataactggctttggtacaggacatattgtgtgccatcgttatgaccccgctaagttgcaatctcacttggatcgtagacgtagaattgacactgcaactacaggcaaggatgcaaagaaaggtgtatgcccttggattagattagatatagacttggaaactggagatttgaaatttgttgatattgaagaacaacagcaacaaaagcaaacaggaaaagatgaagacttgggcgtaaaaacactttggaagactaaaagacataaaggtagtgtccgtgccatgtgctttgattctaaaggtgacaatattttttctgttggaagtgataatgttttaaaaaaggccaatactatgaccggcaaagtcgtcaaaaaggtaaacttaagcagtttatttaattctgaagagaaaaaaaatgataaatttacgaaattatgcgcctctcaaactcacccattcattttaataggcgatgaatccggtaatatacacgtaataaactctgaaaacttggcattatccaattccattcgttctatacattttggcgactctatcaacgatattttccactttgataaaagatctgcatataaattcatttctttgggccagacaacgttagcttattttgacgttcgcgacaaagatgccaaaccgaacgtagctggaaacgaggatggtaaaattttgatcagcgatgatcaggaggacgaagttctttgtggttgtttcgtcgatcccgaagtagcagatacccttttgtgtgggatgggcgagggtattgttaccgtctggaaaccgaataagaatgatttggaagatcaaatgagccgtattaaaattagcaaagatgaaagtatcgattgcattgttcctactttacaagatgataactgtgtatggtgtggttgttccaatggtaacatttataaagtaaatgccaaattgggaaaagtcgtcgagataagaaaccacagtgaattggatgaagtcagttttgttgatttggattttgaataccgtgttgtttctggtggtttggaaaacatcaagatatgggaattatccagtgatgatgtagaggaaaatgcatctgtagagtccgatagcgacgaacccctctcccactctgatgaggatttgagtgatgacactagttctgatgatgaaacgacgcttgtcgggctctctaaggaagagttattagacgaattagataaggacctcaaggaagatcatcaagaggaaaaagaatccaactccaaatctgtcaaaaaaagaaaaataatgaaggagaacaacaaaaaaaaggacctttatgagcatgggatcaagaagtttgatgatttatga

SEQ ID NO: 11747 - DNA, 258 bp, Saccharomyces cerevisiae
atgagacccgttgtatccactggtaaggcatggtgttgtaccgtcctatcggcatttggtgtagtaattctttccgtcattgctcatctcttcaacacaaaccatgaatcctttgtaggatcaataaacgatcctgaagatggacctgctgttgcacatactgtttatttggctgccttggtatacctcgtgtttttcgtattctgtgggttccaagtttacctagccagaagaaaaccttcgatcgagttgcgttag

SEQ ID NO: 11748 - DNA, 258 bp, Artificial Sequence
  Description of Artificial Sequence: Synthetic polynucleotide
atgagacccgttgtatccactggtaaggcatggtgttgtaccgtcctttctgcatttggtgtagtaattctttccgtcattgctcatctcttcaacacaaaccatgaatcctttgtaggatccataaacgatcctgaagatggacctgctgttgcacatactgtttatttggctgccttggtatacctcgtgtttttcgtattctgtgggttccaagtttacttggccagaagaaaaccttccatcgagttgcgttga

SEQ ID NO: 11749 - DNA, 1731 bp, Saccharomyces cerevisiae
atgacaaaatatgagcgtgaccctgaattggtgaactttctatcgaaagtggaggatttgaactctaagagatacagtaatattcctagttcaaaaccagcgggggaagcgctttcaccagttagaagtcacaactctggggaatacagaagggctgatatgatgacagggaaaaatgtggaaggttgcgacaatttggcctaccgatctgcgtacaattatgaaatgacgttttctccaaagaagactcattactcattaagtgagctgaatctcgaacgaataacgccaaggccggatttggagggaagtgcctctcaaaaagaaaaaaaatttttaatttctgaagaagattatttattattgcagaaattgaaagcctctcaaacatataatgattccaatgctgacaaaaatttgccttcctttgaaaaaggtcctcgtatgcccagtcggggtcgacccagaccgagagagaaggaaataatcaccatccaatatgattttgaattaccaggaagagccgatataccctcctcctcctcttcttcatcaccaccgcctttgcccacaaggcgtgatcatatcaaaatcacagatgggaatgaagagaaaccgcttcttccaacaaggcctaacaaagcagaagttacagaaagtccgtcatcaaggtcaataaaaccggatgctgtggtacctgagcgcgttaagcctgctccacctgtctcacgctctacaaaaccggcgagctttttaagttctttggaagataacaaattgacaaaggcgaagagttataattcggaaatggaaactcccaaaacaactgtaaaaagttctcatatcgattacttggattccatacaactaaaaccaaccaccttatctcctacaatgaaaaataaacctaaaccaacccctccttctccacctgcgaaaagaattccaagatctgaaagttttatcaagtctatgctaaactcgaatctcacgacaacttccaagccttctttgcctgaaaaacctcaaaagctacggaatgcaaatttggccgcccataagaccaaaccaagcataccgccaaagaaagtggagttgaatatagtattacctgagctacgtcccgtagaaacttctccaacaaagcagaacttcgaaaactcaatcgatttgcccaagttacgatccagcaaccgtaacattaaaaaagaagaggaggacagtattccagaagcaataaaaggtatacaaaatctgaagaaaaccaaacagcagaagcctgcaatccctcagaaaaaatcatttctaacaaataattcgaaaaatactacactcaaaaatggtgatgatattaacaagttaaatgacgaaattgaagctctatcattgcggaataacctgaagaaacggccaccaacggcgccacaacgtaaaatttctttgccagaggcattgcgaaaagtcgaattgatgaaaaaatctaaaaccgagcctgttttagagtcctcaaacgaactgagcataaacgcaaaattagacgcaataattgcctctagaaacttaagagcatctaatactctaccagaacttagcggtgttaacactaatattgcaacttctgacaagtatactacttctagagatgaaacagtgaaggaaactaaaccattagttcacccgaataaaaataggactcgtggtcccagaagaaaacttccaacacgcgtgtaa

SEQ ID NO: 11750 - DNA, 1731 bp, Artificial Sequence
  Description of Artificial Sequence: Synthetic polynucleotide
atgacaaaatatgagcgtgaccctgaattggtgaactttttatccaaagtggaggatttgaactctaagagatacagtaatattcctagttctaaaccagcgggggaagcgctttctccagttagaagtcacaactctggggaatacagaagggctgatatgatgacagggaaaaatgtggaaggttgcgacaatttggcctacagatctgcgtacaattatgaaatgacgttttctccaaagaagactcattactctttaagtgagttgaatctcgaaagaataacgccaaggccggatttggagggaagtgcctctcaaaaagaaaaaaaatttttaatttctgaagaagattatttattattgcagaaattgaaagcctctcaaacatataatgattccaatgctgacaaaaatttgccttcctttgaaaaaggtcctcgtatgcccagtagaggtagacccagaccgagagagaaggaaataatcaccatccaatatgattttgaattaccaggaagagccgatataccctcctcctcctcttcttcttctccaccgcctttgcccacaaggcgtgatcatatcaaaatcacagatgggaatgaagagaaaccgcttcttccaacaaggcctaacaaagcagaagttacagaaagtccgtcttccaggtctataaaaccggatgctgtggtacctgagcgcgttaagcctgctccacctgtctctcgctctacaaaaccggcgagctttttaagttctttggaagataacaaattgacaaaggcgaagagttataattctgaaatggaaactcccaaaacaactgtaaaaagttctcatatcgattacttggattccatacaattgaaaccaaccaccttatctcctacaatgaaaaataaacctaaaccaacccctccttctccacctgcgaaaagaattccaagatctgaaagttttatcaagtctatgttgaacagtaatctcacgacaacttccaagccttctttgcctgaaaaacctcaaaagttgagaaatgcaaatttggccgcccataagaccaaaccaagcataccgccaaagaaagtggagttgaatatagtattacctgagttgcgtcccgtagaaacttctccaacaaagcagaacttcgaaaactctatcgatttgcccaagttaagatccagcaaccgtaacattaaaaaagaagaggaggacagtattccagaagcaataaaaggtatacaaaatttgaagaaaaccaaacagcagaagcctgcaatccctcagaaaaaaagttttttaacaaataattctaaaaatactacactcaaaaatggtgatgatattaacaagttaaatgacgaaattgaagctttatctttgagaaataacttgaagaaaaggccaccaacggcgccacaacgtaaaatttctttgccagaggcattgagaaaagtcgaattgatgaaaaaatctaaaaccgagcctgttttagagtccagtaacgaattgagcataaacgcaaaattagacgcaataattgcctctagaaacttaagagcatctaatactttaccagaacttagcggtgttaacactaatattgcaacttctgacaagtatactacttctagagatgaaacagtgaaggaaactaaaccattagttcacccgaataaaaataggactcgtggtcccagaagaaaacttccaacacgcgtgtga

SEQ ID NO: 11751 - DNA, 603 bp, Saccharomyces cerevisiae
atggcttggactagtacattaccagcgcatctactgaacctgatcaaaaactccaaatatgttcacgtggccacctgttctaaagactgcatcccttcagtggcattgatgaactatatctatgtgccaggtgaaaaactgttcggtcaaacagataataagaatgactacattatatttgtttctcctcaggacacacaaaagttttacaacatcaaggagaaccctaaggtcgccctgttgtttcacgattggatcatcgcgaataatttgtcagtgggcaaggaaagcatctctgggactccgacgccgacttctattcctcatgaagagcaacgtcaaagcgagcttttaaatttgttacaggagttaaatcaagccgaattgaaccaaatgagcgcatctattggtggcgaaaccgaaattgtcaatcctgaaagtgaagaatccaagtactataaagatttaatactaaaggctaatcctgatgcgaaagcttttatatttgaaaagaacaccgccgttgttaaagttagaattgataatgctagggtatccaataatgagaacagaacaatgtttctaagtaaagggaagagttaa

SEQ ID NO: 11752 - DNA, 603 bp, Artificial Sequence
  Description of Artificial Sequence: Synthetic polynucleotide
atggcttggactagtacattaccagcgcatttattaaacttgatcaaaaactccaaatatgttcacgtggccacctgttctaaagactgcatcccttctgtggcattgatgaactatatctatgtgccaggtgaaaaattattcggtcaaacagataataagaatgactacattatatttgtttctcctcaggacacacaaaagttttacaacatcaaggagaaccctaaggtcgccttattgtttcacgattggatcatcgcgaataatttgtctgtgggcaaggaaagcatctctgggactccgacgccgacttctattcctcatgaagagcaacgtcaaagcgagcttttaaatttgttacaggagttaaatcaagccgaattgaaccaaatgagcgcatctattggtggcgaaaccgaaattgtcaatcctgaaagtgaagaatccaagtactataaagatttaatattgaaggctaatcctgatgcgaaagcttttatatttgaaaagaacaccgccgttgttaaagttagaattgataatgctagggtatccaataatgagaacagaacaatgtttttgagtaaagggaagagttga

SEQ ID NO: 11753 - DNA, 1314 bp, Saccharomyces cerevisiae
atgagcacgggagattttttaactaagggaatagaactggttcaaaaggccattgacctggacacagccacgcagtatgaggaggcgtatacagcatactataacggattagattatttgatgttggctttgaaatacgagaaaaaccctaagtcgaaggatttgataagagcgaagtttacagagtatctaaaccgtgcagagcagttgaaaaagcacttggaaagtgaagaggcaaacgcggcaaagaaatctcctagcgctggtagtggttccaacggtggtaataagaaaatctctcaggaagagggtgaggataatggtggagaagacaacaaaaagctaagaggtgccttatcgagtgctattttgtctgagaagcccaatgttaagtgggaagacgtggctggactggaaggagccaaagaggcccttaaagaagccgttattttacctgtcaagttcccacatttgttcaaaggtaaccgtaagcccacttcgggaatcttattgtacggaccaccaggtacaggtaaatcatatttggcaaaagcagtggccaccgaggccaattctacctttttcagtgttagttccagtgatttggtttctaagtggatgggtgaatctgaaaaacttgtcaaacagttatttgcgatggcaagagaaaataaaccttctattatttttatagatgaagtggatgcgctaacaggtaccagaggagaaggagagagcgaagcaagtagaagaattaaaacagaattattggtacaaatgaatggtgttgggaatgactcccaaggtgttttggtccttggcgcaacaaatatcccatggcaactggacagtgccatcaggagaagatttgaaagaagaatatatataccattaccagatttggcggcaagaaccaccatgttcgagattaacgtcggcgacactccatgcgtattgaccaaggaagattatagaactttaggtgcaatgactgaaggttattccgggagtgatattgctgtagtggtgaaagatgcgctaatgcaaccgataagaaaaattcaaagcgcgacacatttcaaagatgtctctacggaggacgacgaaacaagaaaactaacaccatgctctccaggtgatgatggcgccatcgagatgagttggacggatattgaagctgatgaattaaaagaaccagatctcaccataaaggatttcttaaaggctatcaaatcgacgagacctaccgtgaatgaggatgacttgctgaagcaagaacagttcactagagattttggtcaagaaggtaactag

SEQ ID NO: 11754 - DNA, 1314 bp, Artificial Sequence
  Description of Artificial Sequence: Synthetic polynucleotide
atgagcacgggagattttttaactaagggaatagaattggttcaaaaggccattgacttggacacagccacgcagtatgaggaggcgtatacagcatactataacggattagattatttgatgttggctttgaaatacgagaaaaaccctaagtccaaggatttgataagagcgaagtttacagagtatttgaaccgtgcagagcagttgaaaaagcacttggaaagtgaagaggcaaacgcggcaaagaaatctcctagcgctggtagtggttccaacggtggtaataagaaaatctctcaggaagagggtgaggataatggtggagaagacaacaaaaagttgagaggtgccttatccagtgctattttgtctgagaagcccaatgttaagtgggaagacgtggctggattagaaggagccaaagaggcccttaaagaagccgttattttacctgtcaagttcccacatttgttcaaaggtaaccgtaagcccacttctggaatcttattgtacggaccaccaggtacaggtaaaagttatttggcaaaagcagtggccaccgaggccaattctacctttttcagtgttagttccagtgatttggtttctaagtggatgggtgaatctgaaaaacttgtcaaacagttatttgcgatggcaagagaaaataaaccttctattatttttatagatgaagtggatgcgttaacaggtaccagaggagaaggagagagcgaagcaagtagaagaattaaaacagaattattggtacaaatgaatggtgttgggaatgactcccaaggtgttttggtccttggcgcaacaaatatcccatggcaattggacagtgccatcaggagaagatttgaaagaagaatatatataccattaccagatttggcggcaagaaccaccatgttcgagattaacgtcggcgacactccatgcgtattgaccaaggaagattatagaactttaggtgcaatgactgaaggttattccgggagtgatattgctgtagtggtgaaagatgcgttaatgcaaccgataagaaaaattcaaagcgcgacacatttcaaagatgtctctacggaggacgacgaaacaagaaaattaacaccatgctctccaggtgatgatggcgccatcgagatgagttggacggatattgaagctgatgaattaaaagaaccagatctcaccataaaggatttcttaaaggctatcaaatctacgagacctaccgtgaatgaggatgacttgttgaagcaagaacagttcactagagattttggtcaagaaggtaactga

SEQ ID NO: 11755 - DNA, 666 bp, Saccharomyces cerevisiae
atgggaattcaggaaaagacattggggatacgaaaagagcgcaaattggtggttgtgcctcgcgaaagaaatcatgttagacacgcttcacaaaggacacgttctaaaaactacaagaatatctccaaaaagagggctcaacaacacgcgtttggattcaatattgctaagactcttgccaagatccaagcgtttgtatgggggtctcccgcagatgaggaagaagaaagcgttgtcccattgtctaaaaattctcaggattgtgtgcctctacaatggcaagcaaagtttgcgcaattgcggcagcagctgcactctacacaaaaggaactacaatttgtcaaggaaaagtgtcatctgttgcagtcggtgttggacgacgcaaacatcgatcaaagatacctggagtctcgtcgagacatgaaaaatattgagcgagacaacctcaaaccgacagaaaatttaccaccttcgccagtaagagcagtaaacccgttagtgacttcaagtccgattcacatgtcgccactccagtcgcgccaacgaccagtttcttccctacagcccccaaagggccccaacttctacgccaagtatcctaagcttcctcaaacgaacattctcagagaatctccgactgaggattcggttccgcacgctgaatag

SEQ ID NO: 11756 - DNA, 666 bp, Artificial Sequence
  Description of Artificial Sequence: Synthetic polynucleotide
atgggaattcaggaaaagacattggggataagaaaagagcgcaaattggtggttgtgcctcgcgaaagaaatcatgttagacacgcttctcaaaggacacgttctaaaaactacaagaatatctccaaaaagagggctcaacaacacgcgtttggattcaatattgctaagactcttgccaagatccaagcgtttgtatgggggtctcccgcagatgaggaagaagaaagcgttgtcccattgtctaaaaattctcaggattgtgtgcctttacaatggcaagcaaagtttgcgcaattgagacagcagttgcactctacacaaaaggaattacaatttgtcaaggaaaagtgtcatcttttgcagtctgtgttggacgacgcaaacatcgatcaaagatacttggagtctcgtagagacatgaaaaatattgagagagacaacctcaaaccgacagaaaatttaccaccttctccagtaagagcagtaaacccgttagtgacttctagtccgattcacatgtctccactccagtcccgccaaagaccagtttcttccttacagcccccaaagggccccaacttctacgccaagtatcctaagcttcctcaaacgaacattctcagagaatctccgactgaggattctgttccgcacgctgaatga

SEQ ID NO: 11757 - DNA, 2070 bp, Saccharomyces cerevisiae
atgtttggctctgggaatgttctgcctgttaaaattcagcctccgctgcttaggccactggcgtatagagttttatcaagaaaatatggtttatcaattaaatctgatggactgtctgctcttgcagaattcgttggcactaatataggtgctaactggagacaagggcctgctacaataaaatttctcgagcaatttgctgcagtatggaaacaacaagaaagaggccttttcatcgaccagagcggggttaaagaagttatacaggagatgaaagaacgtgagaaagtcgaatggagtcatgaacaccctattcaacatgaggagaatatcttgggacggacagatgacgatgagaacaacagtgacgatgaaatgccgatcgctgctgattcatccttacaaaatgtttcattatcttcacccatgcgacagcccaccgaaagagatgaatataaacagcctttcaagccagaaagctccaaggcgttggactggagggactacttcaaagttatcaatgcttctcagcaacaaagattctcatacaatccgcacaaaatgcaatttattttcgtccccaataaaaagcagaatgggctaggaggcattgcgggttttctaccagatatagaggacaaagttcaaatgttcttgacaagatattacctcacgaacgacagagtcatgagaaatgaaaacttccaaaacagtgacatgtttaatccattatcatctatggtgtctttacaaaatgaactgtccaatactaaccgacagcagcaatccagcagtatgagtatcaccccaataaaaaacctactaggtagggatgctcaaaactttctactattggggctcttaaataagaactttaagggcaattggtcactggaagatccgtctggatctgtcgaaattgacatttcccaaactatccctacacaaggccattactacgtgccaggttgcatggttcttgtggaaggaatatactattctgtaggaaataaattccatgttacctccatgactttaccccctggtgagagaagagaaattacattagaaacgataggtaatctcgatctcttaggaatacatggcatttctaataacaatttcattgctcgtttggataaagatttgaagattagattacaccttttggagaaagaattaacagatcataaatttgtaattctcggcgcaaatttgttcctagatgatttgaaaattatgactgcactcagcaaaattttgcaaaaattaaatgatgacccaccgaccctattaatttggcaaggttctttcacttcagttcccgttttcgcatcaatgagtagccggaatataagtagttccactcaatttaagaataatttcgatgccttggcgacgcttctgtcaagatttgacaatttgaccgaaaataccacaatgatatttattccaggtcctaacgatttatgggggtcgatggtgtcattgggggcaagtgggacattaccgcaagatccaattcctagtgcgtttaccaaaaaaatcaacaaggtctgtaaaaacgttgtatggagctcaaatccaactagaatagcatacttatcccaagaaatagtcattttcagggacgatttatccggaagattcaaaagacaccgtttggaattcccattcaacgagagcgaagatgtttatactgaaaacgataacatgatgtctaaagacaccgatattgtaccaatcgatgaattagttaaagaaccagaccagttaccacaaaaggttcaagaaacaagaaaactcgttaaaacaatactagaccagggtcatttatcgccatttcttgattccttgcgcccaatttcatgggatttggaccacactttgacactttgcccaataccatcgacaatggttctttgcgacactacttctgcacaatttgatttgacatacaacggttgtaaagtaattaaccctggaagtttcattcataatagacgtgctaggtatatggagtacgttccatcctcaaagaaaactatacaagaagagatatatatctaa

SEQ ID NO: 11758 - DNA, 2070 bp, Artificial Sequence
  Description of Artificial Sequence: Synthetic polynucleotide
atgtttggctctgggaatgttttacctgttaaaattcagcctccgttacttaggccattggcgtatagagttttatctagaaaatatggtttatccattaaatctgatggattatctgctcttgcagaattcgttggcactaatataggtgctaactggagacaagggcctgctacaataaaatttctcgagcaatttgctgcagtatggaaacaacaagaaagaggccttttcatcgaccagagcggggttaaagaagttatacaggagatgaaagaacgtgagaaagtcgaatggagtcatgaacaccctattcaacatgaggagaatatcttgggaagaacagatgacgatgagaacaacagtgacgatgaaatgccgatcgctgctgattcttccttacaaaatgtttctttatcttctcccatgaggcagcccaccgaaagagatgaatataaacagcctttcaagccagaaagctccaaggcgttggactggagggactacttcaaagttatcaatgcttctcagcaacaaagattctcttacaatccgcacaaaatgcaatttattttcgtccccaataaaaagcagaatgggttgggaggcattgcgggttttttaccagatatagaggacaaagttcaaatgttcttgacaagatattacctcacgaacgacagagtcatgagaaatgaaaacttccaaaacagtgacatgtttaatccattatcttctatggtgtctttacaaaatgaattatccaatactaacagacagcagcaatccagcagtatgagtatcaccccaataaaaaacttattgggtagggatgctcaaaactttttattattggggctcttaaataagaactttaagggcaattggtctttggaagatccgtctggatctgtcgaaattgacatttcccaaactatccctacacaaggccattactacgtgccaggttgcatggttcttgtggaaggaatatactattctgtaggaaataaattccatgttacctccatgactttaccccctggtgagagaagagaaattacattagaaacgataggtaatctcgatctcttaggaatacatggcatttctaataacaatttcattgctcgtttggataaagatttgaagattagattacaccttttggagaaagaattaacagatcataaatttgtaattctcggcgcaaatttgttcttggatgatttgaaaattatgactgcactcagcaaaattttgcaaaaattaaatgatgacccaccgaccttattaatttggcaaggttctttcacttctgttcccgttttcgcatctatgagtagcagaaatataagtagttccactcaatttaagaataatttcgatgccttggcgacgcttttatctagatttgacaatttgaccgaaaataccacaatgatatttattccaggtcctaacgatttatgggggtccatggtgtctttgggggcaagtgggacattaccgcaagatccaattcctagtgcgtttaccaaaaaaatcaacaaggtctgtaaaaacgttgtatggagcagtaatccaactagaatagcatacttatcccaagaaatagtcattttcagggacgatttatccggaagattcaaaagacaccgtttggaattcccattcaacgagagcgaagatgtttatactgaaaacgataacatgatgtctaaagacaccgatattgtaccaatcgatgaattagttaaagaaccagaccagttaccacaaaaggttcaagaaacaagaaaactcgttaaaacaatattggaccagggtcatttatctccatttcttgattccttgcgcccaatttcttgggatttggaccacactttgacactttgcccaataccatctacaatggttctttgcgacactacttctgcacaatttgatttgacatacaacggttgtaaagtaattaaccctggaagtttcattcataatagacgtgctaggtatatggagtacgttccatcctccaagaaaactatacaagaagagatatatatctga

SEQ ID NO: 11759 - DNA, 978 bp, Saccharomyces cerevisiae
atgtcaggatctcttacgctacttaaggaaaagcatatacgttatattgaatcattggatacaaagaagcataattttgaatactggcttaccgagcatcttcgtttgaatgggatatattggggacttactgccttgtgtgtgcttgattctccagagacatttgtgaaagaagaggttatatcatttgttctgagctgttgggacgacaaatacggcgctttcgcaccatttccaagacatgatgcacatttattaactacattgtccgccgtacagatcttggccacttatgatgctttggatgttcttggaaaagatcgtaaggttcgcttgatttccttcatccgtgggaatcaattggaagatggttcgttccagggtgacaggtttggggaggtagatacaaggtttgtttatacagccttgagtgcactatcaattttgggtgaattaacgtctgaagttgttgaccctgctgtagactttgtactcaagtgttataattttgatggtggctttggattatgtcctaatgctgaatcccatgcagctcaagcttttacctgtcttggcgctttggcaattgctaacaaattggatatgcttagtgacgaccaactagaagaaattgggtggtggctttgcgaacgacaattaccagaaggtggactaaacggtaggccaagtaaactgcccgatgtttgctatagttggtgggttttatcttcattagctattattggtagactagattggataaattatgagaagctaactgagtttatactcaaatgtcaagatgagaagaagggtggaataagcgacaggcctgaaaatgaagtggatgtcttccatacagtttttggtgttgctggtttaagtttaatgggatacgacaatttagtccccatagatcccatatattgtatgccgaaatccgttacatcaaaattcaaaaagtatccatacaaatag

SEQ ID NO: 11760 - DNA, 978 bp, Artificial Sequence
  Description of Artificial Sequence: Synthetic polynucleotide
atgtctggatctcttacgttacttaaggaaaagcatatacgttatattgaatctttggatacaaagaagcataattttgaatactggcttaccgagcatcttcgtttgaatgggatatattggggacttactgccttgtgtgtgcttgattctccagagacatttgtgaaagaagaggttatatcctttgttttaagctgttgggacgacaaatacggcgctttcgcaccatttccaagacatgatgcacatttattaactacattgtccgccgtacagatcttggccacttatgatgctttggatgttcttggaaaagatcgtaaggttcgcttgatttccttcatccgtgggaatcaattggaagatggttctttccagggtgacaggtttggggaggtagatacaaggtttgtttatacagccttgagtgcattatccattttgggtgaattaacgtctgaagttgttgaccctgctgtagactttgtactcaagtgttataattttgatggtggctttggattatgtcctaatgctgaatcccatgcagctcaagcttttacctgtcttggcgctttggcaattgctaacaaattggatatgcttagtgacgaccaattggaagaaattgggtggtggctttgcgaaagacaattaccagaaggtggattgaacggtaggccaagtaaattgcccgatgtttgctatagttggtgggttttatcttctttagctattattggtagattagattggataaattatgagaagttgactgagtttatactcaaatgtcaagatgagaagaagggtggaataagcgacaggcctgaaaatgaagtggatgtcttccatacagtttttggtgttgctggtttaagtttaatgggatacgacaatttagtccccatagatcccatatattgtatgccgaaatccgttacaagtaaattcaaaaagtatccatacaaatga

SEQ ID NO: 11761 - DNA, 1398 bp, Saccharomyces cerevisiae
atgagtaaatatattgcacttgaaaatcttccggtagatttgcaacataaaggagctacacaaaatgaaagcaccgctgatatactgaaacagttgccacatgaacgattacaagctgtcctggagaagataccagaagaagatcttgaggtgagacgattgctttcaattttaaagaagccggaagtagtggagaatgaagatgtacaacaaagaagaatacggttggctgaaattttaatggttgatgaaattgatcttgagaacattaataacatggaaaacataaatggggaagaagtagacgaagaggacgatgaggacttcttcactccagcaacatctgagctcatttttgcgagaagatttttgataaattattcacttgaaagatctcgaaagaggctacagaaagagatggaaagacatcaaaagttcaatacaagacaggaattactcagtcggcgtacagaattacagcgtatggctaatttagagcttgctggctctcaattagtatctacgaagcctatttccgcagtttctttatctaccgatgacatggttgtcgcaacgggaagctgggcaggtgatcttcaggtattaaattctcaaacactgcagccattgacacaaaaactcgactctcatgtagggaaaatcggagctatagattggcatcctgattcaaacaatcaaatgatttcatgcgcagaagacgggctcatcaaaaactttcaatactcaaacgaagagggcggccttcgattattgggagatcttgtgggacatgaaagacgtatttctgatgtgaaataccaccctagtggcaaatttataggtagtgcctctcatgatatgacttggagactttgggatgcgtcaacacatcaagaactgctgctacaagaaggccatgataagggagtgtttagtctgtcttttcaatgcgatggatctcttgtttgtagcggtggcatggactcgctttcaatgctatgggatataagatccggaagtaaggtgatgacactcgcaggacactcaaagcctatttacaccgtagcttggtcaccaaacgggtatcaagtagccactggtggtggtgatggaatcattaatgtttgggacatcagaaaacgggatgaaggccaactaaatcaaatattggcgcatcgtaacatcgttacgcaggtaaggttttcaaaggaagacggcggaaagaaacttgtctcttgtggctatgataatttgatcaatgtgtatagtagtgatacgtggttaaaaatgggaagtttagcaggccacactgataaaattattagcttggatatttcgaataattctcattttttagtgagcggcggatgggataggtctatcaagctctggaattga

SEQ ID NO: 11762 - DNA, 1398 bp, Artificial Sequence
  Description of Artificial Sequence: Synthetic polynucleotide
atgagtaaatatattgcacttgaaaatcttccggtagatttgcaacataaaggagctacacaaaatgaaagcaccgctgatatattgaaacagttgccacatgaaagattacaagctgtcttggagaagataccagaagaagatcttgaggtgagaagattgctttctattttaaagaagccggaagtagtggagaatgaagatgtacaacaaagaagaataagattggctgaaattttaatggttgatgaaattgatcttgagaacattaataacatggaaaacataaatggggaagaagtagacgaagaggacgatgaggacttcttcactccagcaacatctgagctcatttttgcgagaagatttttgataaattattctcttgaaagatctagaaagaggttacagaaagagatggaaagacatcaaaagttcaatacaagacaggaattactcagtagacgtacagaattacagcgtatggctaatttagagcttgctggctctcaattagtatctacgaagcctatttccgcagtttctttatctaccgatgacatggttgtcgcaacgggaagctgggcaggtgatcttcaggtattaaattctcaaacattacagccattgacacaaaaactcgactctcatgtagggaaaatcggagctatagattggcatcctgattccaacaatcaaatgatttcttgcgcagaagacgggctcatcaaaaactttcaatactctaacgaagagggcggccttcgtttattgggagatcttgtgggacatgaaagacgtatttctgatgtgaaataccaccctagtggcaaatttataggtagtgcctctcatgatatgacttggagactttgggatgcgtctacacatcaagaattattattacaagaaggccatgataagggagtgtttagtttatcttttcaatgcgatggatctcttgtttgtagcggtggcatggactctctttctatgttatgggatataagatccggaagtaaggtgatgacactcgcaggacactccaagcctatttacaccgtagcttggtctccaaacgggtatcaagtagccactggtggtggtgatggaatcattaatgtttgggacatcagaaaaagagatgaaggccaattgaatcaaatattggcgcatcgtaacatcgttacgcaggtaaggttttccaaggaagacggcggaaagaaacttgtctcttgtggctatgataatttgatcaatgtgtatagtagtgatacgtggttaaaaatgggaagtttagcaggccacactgataaaattattagcttggatatttctaataattctcattttttagtgagcggcggatgggataggtctatcaagctctggaattga

SEQ ID NO: 11763 - DNA, 1968 bp, Saccharomyces cerevisiae
atggatttactacgcattttagacacgaaaccaatacctacaattgttgatgctactactctgggaatctcaggaaatacttccggtgattattggctgccaactacaatgtcgctttatcaaaaagaactcacggatcaaatagtatcattacactactcagatatcttgagatacttcgaaacgtcacactacaaagaggacgtcattctcgaatctatgaagaccatgtgtttaaatggttcactggtagcaacccatccatacctactaatagatcattatatgcctaaatcgttaataactcgtgatgttcctgcacatttagcggaaaatagtggaaagttcagcgttttgagagatctcataaatcttgttcaagaatatgaaactgaaacggccattgtttgtagacctgggagaacaatggacttactggaagccttactattgggaaataaggtgcatatcaaaagatatgacggtcattctatcaagtcaaaacaaaaggcaaatgacttctcgtgtacagttcatttgttttcttctgaaggaattaatttcacaaaatatccgataaaatccaaggctcgattcgacatgctgatctgcttagatactacagtggatacaagtcaaaaagatattcaatatttgttgcaatataagagggagaggaagggtttagaaagatatgctccaattgttaggctagtggccattaattcaattgatcattgtaggttattctttggtaaaaaatttgacaagaacagtagagaatacttggagaacgttaccgcagctatggtaattttaagagatcgactgggcacacttccacctgatttgaggcccatttattcacaaaagctgcattatttagtagaatggttggaaaacccaacagtaccgtggccattaccagatatttaccctttaaaacaatatacttccatggatgtagaaaggtctttgttaacggaagtacatttcaaaaagtcagatgatcaactagaggatgctttttccaactgttccaaaaaaagaggacgccatggtgctaataaggcagcatcttcaactgttgccggaattgaggataatattactccaagtttttactctaccaaaagattaaagaacgattattatacaaatcctttaaaacaagacatgacacaactaacaggtattactacagctgacaactcctcgaatgtaaattaccacttatcaagtggaatcataacacacaaactgattcaatcaatgggagaagtgtatatggatatttgcgttcagaaacaggagctggatgattattcttgccttgatgatttgcaaaatgatcatctgaaatttttctcaaatgaagatgagaaaattataaaagaatatgaaaccgtattgcgaaccaataatgaaaacttaaataggtcgcatgaactagaagttgaaaacaatttgaagttttcccaaatcgaaacactggaaaaagacattgaaactttaaagggaagtttgatggcccaaggtgaaacattatcaaagttaaaagacgctttcgttaaaacagacaatgtacaagacgagatcgagaaagaagaaagggtaagtgtatcaagggatactgagaagaaatatatggaacaagaaatcaaaagagccgttgatgctataagggaaaatgaggaggagacacacaaacttaatgagaaacaaaatggattagaaagtgagttgaaattgaaattcgaaaagtctgaaatctctacaaaagaattgaatgagaaaattggctttttgaaaaaggaattaaagcttgagaatgatctaaacgaggagttagtgggacagttatcgaagacgatggacaacttggaaaacttaacaattccacgagttcgtactcaaaatggtaacacaaaaaaaaaatccagggcaaaaaaaccaggaaatgtataa

SEQ ID NO: 11764 - DNA, 1968 bp, Artificial Sequence
  Description of Artificial Sequence: Synthetic polynucleotide
atggatttacttcgcattttagacacgaaaccaatacctacaattgttgatgctactactttgggaatcagtggaaatacttccggtgattattggttaccaactacaatgtctctttatcaaaaagaactcacggatcaaatagtatctttacactactctgatatcttgagatacttcgaaacgagccactacaaagaggacgtcattctcgaatctatgaagaccatgtgtttaaatggttctttagtagcaacccatccatacttgttaatagatcattatatgcctaaatctttaataactcgtgatgttcctgcacatttagcggaaaatagtggaaagttcagcgttttgagagatctcataaatcttgttcaagaatatgaaactgaaacggccattgtttgtagacctgggagaacaatggacttattggaagccttattattgggaaataaggtgcatatcaaaagatatgacggtcattctatcaagagtaaacaaaaggcaaatgacttctcttgtacagttcatttgttttcttctgaaggaattaatttcacaaaatatccgataaaatccaaggctagattcgacatgttgatctgcttagatactacagtggatacaagtcaaaaagatattcaatatttgttgcaatataagagggagaggaagggtttagaaagatatgctccaattgttaggttggtggccattaattctattgatcattgtaggttattctttggtaaaaaatttgacaagaacagtagagaatacttggagaacgttaccgcagctatggtaattttaagagatagattgggcacacttccacctgatttgaggcccatttattctcaaaagttgcattatttagtagaatggttggaaaacccaacagtaccgtggccattaccagatatttaccctttaaaacaatatacttccatggatgtagaaaggtctttgttaacggaagtacatttcaaaaagagtgatgatcaattggaggatgctttttccaactgttccaaaaaaagaggacgccatggtgctaataaggcagcatcttctactgttgccggaattgaggataatattactccaagtttttactctaccaaaagattaaagaacgattattatacaaatcctttaaaacaagacatgacacaattgacaggtattactacagctgacaactcctctaatgtaaattaccacttatccagtggaatcataacacacaaattgattcaatctatgggagaagtgtatatggatatttgcgttcagaaacaggagttagatgattattcttgccttgatgatttgcaaaatgatcatttgaaatttttcagtaatgaagatgagaaaattataaaagaatatgaaaccgtattgagaaccaataatgaaaacttaaataggagccatgaattggaagttgaaaacaatttgaagttttcccaaatcgaaacattagaaaaagacattgaaactttaaagggaagtttgatggcccaaggtgaaacattatccaagttaaaagacgctttcgttaaaacagacaatgtacaagacgagatcgagaaagaagaaagggtaagtgtaagtagggatactgagaagaaatatatggaacaagaaatcaaaagagccgttgatgctataagggaaaatgaggaggagacacacaaacttaatgagaaacaaaatggattagaaagtgagttgaaattgaaattcgaaaagtctgaaatctctacaaaagaattgaatgagaaaattggctttttgaaaaaggaattaaagcttgagaatgatttgaacgaggagttagtgggacagttatccaagacgatggacaacttggaaaacttaacaattccaagagttcgtactcaaaatggtaacacaaaaaaaaaatccagggcaaaaaaaccaggaaatgtatga

SEQ ID NO: 11765 - DNA, 1044 bp, Saccharomyces cerevisiae
atggatatgaaagtagaaaaattaagtgaagatgaaattgcactgtatgatagacagattcgtctatggggaatgacagcacaggccaatatgagatcagcaaaagtattgctgatcaatcttggagcaattggttctgaaattaccaaaagtatcgtccttagtggtatagggcatttaaccatattggatggacacatggtgactgaagaagatttaggatcccagttcttcataggctctgaagatgttggccaatggaagattgatgcaacaaaagagagaattcaagacttgaacccccgtatagagttgaactttgataagcaggatttgcaagaaaaggacgaagagttctttcagcagtttgatttagtcgtggctacagaaatgcagattgatgaagcaatcaaaattaacacattaactcgaaaactaaacattccattatatgttgctggttctaatggattgttcgcttatgtttttattgatttgattgaattcatttcagaggatgaaaaattgcaaagtgtaagacctaccaccgttggtcccatttcaagcaataggagcattatagaagttactactagaaaagatgaagaagatgaaaaaaaaacatatgaacgaatcaagaccaagaactgctataggccactgaacgaagttttaagcacagcaacattaaaggaaaaaatgacgcaaagacagttaaaaagagtcactagtatcttgccgttaaccctgtccttattgcaatatggtctcaaccaaaagggcaaggccataagctttgaacaaatgaaaagagatgcggccgtatggtgtgaaaatctgggtgtaccagcaacagtggtaaaggacgattacatacaacagtttatcaaacagaaaggtatcgagtttgctcctgtcgcggccattatagggggtgctgtagcgcaggatgtcattaacattctaggtaaaaggctatctccattaaataatttcattgtttttgatggtattacattagacatgccactttttgagttttag

SEQ ID NO: 11766 - DNA, 1044 bp, Artificial Sequence
  Description of Artificial Sequence: Synthetic polynucleotide
atggatatgaaagtagaaaaattaagtgaagatgaaattgcattatatgatagacagattcgtttatggggaatgacagcacaggccaatatgagaagtgcaaaagtattgttgatcaatcttggagcaattggttctgaaattaccaaaagtatcgtccttagtggtatagggcatttaaccatattggatggacacatggtgactgaagaagatttaggatcccagttcttcataggctctgaagatgttggccaatggaagattgatgcaacaaaagagagaattcaagacttgaacccccgtatagagttgaactttgataagcaggatttgcaagaaaaggacgaagagttctttcagcagtttgatttagtcgtggctacagaaatgcagattgatgaagcaatcaaaattaacacattaactagaaaattgaacattccattatatgttgctggttctaatggattgttcgcttatgtttttattgatttgattgaattcatttctgaggatgaaaaattgcaaagtgtaagacctaccaccgttggtcccatttctagcaataggagcattatagaagttactactagaaaagatgaagaagatgaaaaaaaaacatatgaaagaatcaagaccaagaactgctataggccattgaacgaagttttaagcacagcaacattaaaggaaaaaatgacgcaaagacagttaaaaagagtcactagtatcttgccgttaaccttatccttattgcaatatggtctcaaccaaaagggcaaggccataagctttgaacaaatgaaaagagatgcggccgtatggtgtgaaaatttgggtgtaccagcaacagtggtaaaggacgattacatacaacagtttatcaaacagaaaggtatcgagtttgctcctgtcgcggccattatagggggtgctgtagcgcaggatgtcattaacattttgggtaaaaggttatctccattaaataatttcattgtttttgatggtattacattagacatgccactttttgagttttga

SEQ ID NO: 11767 - DNA, 2307 bp, Saccharomyces cerevisiae
atggacttcgagactaatgaagacatcaacggggtccgtttcacctggaacgtgtttccctctactagaagcgacgctaacagcaacgtcgtccctgtgggctgtttgtacacacctttgaaggagtatgacgaattgaacgttgccccatacaatccagttgtgtgttccggtccacactgtaagtcgattctaaatccttactgtgtgattgatccgcgcaattcgtcctggagttgtcccatctgtaactccaggaaccatttacctccacagtacaccaacttgtcacaggagaatatgccgctagagttacagtccaccaccattgagtacatcaccaataagcccgttaccgttcctcccattttcttctttgttgtggatttgacttcggaaaccgagaacctcgattcgctaaaggagtctatcatcacttctttgtctctattacctcccaacgcgctgattgggttgatcacttacggaaacgttgttcaattgcacgatctgtccagcgaaactattgacaggtgcaacgtgttcagaggagacagggagtaccagctcgaagcgttgacggaaatgttgaccggccaaaagcctaccggccccggcggtgctgcatctcatctaccgaacgccatgaacaaagttacgcccttctctttgaataggttcttcctgcccttggaacaggtcgagttcaaactgaatcaattactggaaaatctgtctccagaccaatggtctgttccagcgggtcataggccattaagggccacaggttccgctttgaacattgcatctttgcttttacagggctgctataagaacatcccagcaagaatcattcttttcgcctccggtccaggcaccgtggccccaggtttgattgttaactcagagttaaaagatcccttaagatcccaccacgacatcgattctgatcacgcgcaacattacaagaaggcctgtaagttttacaaccagattgcacaaagagttgccgccaatggacacactgttgatatttttgccggttgttacgatcaaatcggtatgtctgaaatgaaacagttgaccgactctactggaggtgtgttgttgctaaccgatgccttctctaccgcgatttttaagcaatcatacttgagattgtttgccaaggatgaagaagggtatttgaagatggctttcaatggtaatatggcagtcaagacaagtaaagacttgaaggtacaaggtttgattgggcatgcttctgctgtaaagaagacagacgctaacaacatcagtgaatctgaaatcggtataggtgcaacgtccacctggaagatggcttccttatcgccttatcactcgtatgcgattttctttgaaattgcaaacactgcggctaattctaacccaatgatgtctgcccctggttcagcagatagacctcatctagcatatactcaattcatcactacttatcaacactcctctggtaccaaccgtatcagagtcaccacggtcgcaaaccagcttttgcccttcggtactcctgccattgcagcttctttcgatcaagaagctgctgccgttttgatggctcgtattgctgttcacaaggctgaaaccgatgatggtgcagatgttattagatggttagacagaactttgattaagctatgtcaaaagtacgccgactataataaagatgatcctcaatctttcaggttggctccaaatttctcactgtatcctcaatttacctattatttaagaagatcccaattcttaagtgtctttaacaattctccggatgaaactgcattttatagacatattttcacaagagaggatacgactaattctttaatcatgattcaaccaactctaacttctttctcaatggaggacgatccacaaccggtattattagactctatctccgtcaaacccaataccattctattattagatacatttttcttcatcttaatataccacggtgagcaaatcgctcaatggagaaaagccggttaccaagacgatccacagtacgcagatttcaaagctcttcttgaagagccaaaattagaagccgcagaattgttagtagataggttcccgctaccaagattcattgatactgaagccggtggttctcaagccagattcttgttatctaaattgaatccttccgataactatcaagacatggcgcgcggaggatctacaattgtcttaacagatgatgtttccttacaaaatttcatgactcacttacaacaagtagccgtctctggtcaggcatag

SEQ ID NO: 11768 - DNA, 2307 bp, Artificial Sequence
  Description of Artificial Sequence: Synthetic polynucleotide
atggacttcgagactaatgaagacatcaacggggtccgtttcacctggaacgtgtttccctctactagaagcgacgctaacagcaacgtcgtccctgtgggctgtttgtacacacctttgaaggagtatgacgaattgaacgttgccccatacaatccagttgtgtgttccggtccacactgtaagtctattttgaatccttactgtgtgattgatccgcgcaattcttcctggagttgtcccatctgtaactccaggaaccatttacctccacagtacaccaacttgtctcaggagaatatgccgttagagttacagtccaccaccattgagtacatcaccaataagcccgttaccgttcctcccattttcttctttgttgtggatttgacttctgaaaccgagaacctcgattctttgaaggagtctatcatcacttctttgtctttattacctcccaacgcgttaattgggttgatcacttacggaaacgttgttcaattgcacgatttatccagcgaaactattgacaggtgcaacgtgttcagaggagacagggagtaccagctcgaagcgttgacggaaatgttgaccggccaaaagcctaccggccccggcggtgctgcatctcatttaccgaacgccatgaacaaagttacgcccttctctttgaataggttcttcttgcccttggaacaggtcgagttcaaattgaatcaattattggaaaatttatctccagaccaatggtctgttccagcgggtcataggccattaagggccacaggttccgctttgaacattgcatctttgcttttacagggctgctataagaacatcccagcaagaatcattcttttcgcctccggtccaggcaccgtggccccaggtttgattgttaacagtgagttaaaagatcccttaagatcccaccacgacatcgattctgatcacgcgcaacattacaagaaggcctgtaagttttacaaccagattgcacaaagagttgccgccaatggacacactgttgatatttttgccggttgttacgatcaaatcggtatgtctgaaatgaaacagttgaccgactctactggaggtgtgttgttgttgaccgatgccttctctaccgcgatttttaagcaatcttacttgagattgtttgccaaggatgaagaagggtatttgaagatggctttcaatggtaatatggcagtcaagacaagtaaagacttgaaggtacaaggtttgattgggcatgcttctgctgtaaagaagacagacgctaacaacatcagtgaatctgaaatcggtataggtgcaacgtccacctggaagatggcttccttatctccttatcactcctatgcgattttctttgaaattgcaaacactgcggctaattctaacccaatgatgtctgcccctggttctgcagatagacctcatttagcatatactcaattcatcactacttatcaacactcctctggtaccaaccgtatcagagtcaccacggtcgcaaaccagcttttgcccttcggtactcctgccattgcagcttctttcgatcaagaagctgctgccgttttgatggctcgtattgctgttcacaaggctgaaaccgatgatggtgcagatgttattagatggttagacagaactttgattaagttatgtcaaaagtacgccgactataataaagatgatcctcaatctttcaggttggctccaaatttctccttatatcctcaatttacctattatttaagaagatcccaattcttaagtgtctttaacaattctccggatgaaactgcattttatagacatattttcacaagagaggatacgactaattctttaatcatgattcaaccaactttaacttctttctccatggaggacgatccacaaccggtattattagactctatctccgtcaaacccaataccattttattattagatacatttttcttcatcttaatataccacggtgagcaaatcgctcaatggagaaaagccggttaccaagacgatccacagtacgcagatttcaaagctcttcttgaagagccaaaattagaagccgcagaattgttagtagataggttcccgttaccaagattcattgatactgaagccggtggttctcaagccagattcttgttatctaaattgaatccttccgataactatcaagacatggcgcgcggaggatctacaattgtcttaacagatgatgtttccttacaaaatttcatgactcacttacaacaagtagccgtctctggtcaggcatga

SEQ ID NO: 11769 - DNA, 261 bp, Saccharomyces cerevisiae
atgagcgagagcagtgatatcagcgcgatgcagccggtgaacccgaagccgttcctcaaaggcctggtcaaccatcgtgtaggcgtcaagcttaagttcaacagcaccgaatatagaggtacgctcgtgtccacggacaactactttaacctgcagctgaacgaagcagaagagtttgttgcgggtgtctcgcacggcaccctgggcgagatattcatccgctgcaataacgtgctgtacatcagggagctgccgaactaa

SEQ ID NO: 11770 - DNA, 261 bp, Artificial Sequence
  Description of Artificial Sequence: Synthetic polynucleotide
atgagcgagagcagtgatatcagcgcgatgcagccggtgaacccgaagccgttcctcaaaggccttgtcaaccatcgtgtaggcgtcaagcttaagttcaacagcaccgaatatagaggtacgctcgtgtccacggacaactactttaacttacagttgaacgaagcagaagagtttgttgcgggtgtctcccacggcaccttaggcgagatattcatccgctgcaataacgtgttatacatcagggagttaccgaactga

SEQ ID NO: 11771 - DNA, 804 bp, Saccharomyces cerevisiae
atgagcatcgaatactctgttatcgttcccgcttaccatgaaaagctgaacatcaaacccttaacaaccagattgtttgccggcatgagccctgaaatggccaagaagaccgagttgatctttgtcgatgacaactcacaggatggctccgttgaggaggtggacgccctagctcaccaaggctacaacgtccgcatcatcgtcaggacaaatgaacgtggtctatcctccgccgtgcttaagggtttctacgaggccaagggtcagtacctggtatgcatggacgcagacctacaacaccctccagagaccgtgcccaagttgttcgagtctttgcacgatcacgcctttactctgggcaccagatatgccccaggtgtcggcattgacaaggactggcctatgtacagacgcgtcatttcctccactgctagaatgatggccagacctttgaccatcgcctccgaccccatgagcgggttcttcggtctacaaaagaagtacctcgaaaactgcaaccctagggacatcaactcgcaaggtttcaagattgccctcgagcttctcgccaagcttcctcttccaagagaccctagagtggcgatcggcgaagtgccattcactttcggcgtgagaacggaaggtgaatccaaactgtcaggtaaagtcattatccaatacttgcaacaacttaaggagctctacgtcttcaagtttggcgccaataaccttatccttttcattactttctggtccattctgttcttctacgtttgctaccagctataccatttggtcttttaa

SEQ ID NO: 11772 - DNA, 804 bp, Artificial Sequence
  Description of Artificial Sequence: Synthetic polynucleotide
atgagcatcgaatactctgttatcgttcccgcttaccatgaaaagttgaacatcaaacccttaacaaccagattgtttgccggcatgagccctgaaatggccaagaagaccgagttgatctttgtcgatgacaactctcaggatggctccgttgaggaggtggacgccttagctcaccaaggctacaacgtccgcatcatcgtcaggacaaatgaacgtggtttatcctccgccgtgcttaagggtttctacgaggccaagggtcagtacttggtatgcatggacgcagacttgcaacaccctccagagaccgtgcccaagttgttcgagtctttgcacgatcacgcctttactttgggcaccagatatgccccaggtgtcggcattgacaaggactggcctatgtacagacgcgtcatttcctccactgctagaatgatggccagacctttgaccatcgcctccgaccccatgagcgggttcttcggtttacaaaagaagtacctcgaaaactgcaaccctagggacatcaactctcaaggtttcaagattgccctcgagcttctcgccaagcttcctcttccaagagaccctagagtggcgatcggcgaagtgccattcactttcggcgtgagaacggaaggtgaatccaaattatctggtaaagtcattatccaatacttgcaacaacttaaggagctctacgtcttcaagtttggcgccaataaccttatccttttcattactttctggtccattcttttcttctacgtttgctaccagttataccatttggtcttttga

SEQ ID NO: 11773 - DNA, 4611 bp, Saccharomyces cerevisiae
atgaatagatcattactgctacgtttgtcggataccggtgaacccattacaagctgctcttacggaaaaggtgtcttgacgctaccaccaattccgctccctaaggacgccccaaaggaccaaccgctctatacggtcaagctactggtatctgcaggttcccctgtcgctagggatgggctagtttggactaattgcccaccagatcacaacacgcccttcaagagggacaaattttacaaaaaaatcattcattccagctttcacgaggatgactgcattgacctgaatgtctacgctccaggctcgtactgcttttatctatctttcaggaacgataacgaaaaacttgagacaacaaggaaatactactttgttgccttgcccatgctttatataaacgatcagttcctacctttgaattccatcgctttacaaagtgttgtatcgaaatggctgggctctgactgggagcccatcctatcgaaaattgccgctaaaaactacaatatggtacatttcacccctctacaggaaagaggcgagtctaactcgccttactctatatacgaccaattgcagttcgaccaggaacactttaagtctcctgaagacgtgaaaaatttagttgagcatatacatcgcgatttaaacatgctttcattaacagatattgtttttaaccacacagctaataattctccttggttagttgagcacccggaggctgggtataaccacatcactgcgccacatctaatcagcgccatagagctcgaccaagaattgctcaattttagtaggaatttgaaatcctggggctatcctaccgaactgaaaaatatagaagatctcttcaagatcatggacggtattaaagtgcatgttttagggtcgttgaaactgtgggaatattatgcggtaaacgtgcaaacagctcttcgggatatcaaagcccattggaatgacgaatctaacgaaagttacagttttcccgagaatattaaagacatctcgtccgatttcgtaaaactagcttcctttgtgaaggacaacgtcactgagcctaacttcggcactcttggtgaaagaaactcaaacaggattaacgtgccaaaatttattcaactactgaagctcattaacgatggtggtagtgatgacagtgaatcttcgttggccacggctcaaaacatcttgaacgaggtcaacttacccttatatagagaatacgacgatgatgtcagtgagatactcgagcaactgttcaatcgtatcaaatatttgagattagatgacggtgggcccaagcaaggtccagtgaccgttgacgtgcccttaacagagccttattttacgaggttcaaaggaaaagatggtactgattatgccctcgccaacaatggctggatatggaatggtaacccactagtggattttgcatcgcagaattcaagagcttatttacgtagagaagttatcgtgtggggggactgtgtcaagttaagatacggtaaaagccctgaagactctccgtatctgtgggaaagaatgtccaagtatatagaaatgaacgccaagatatttgacgggttcagaattgacaactgccattctactccaatacatgttggcgaatatttcctagatttggcaagaaaatacaacccgaacctatatgtcgttgcagagctgttttctggttccgaaacactagattgtctgtttgttgaacggttgggtatctcctctttaatcagagaggcaatgcaagcctggtccgaagaagagttgtctagattagtccataagcatggcgggaggcccattggctcctataagtttgttcctatggatgacttctcatatcctgcggatattaatttaaacgaggagcattgtttcaacgactccaacgataactccataagatgtgtatcagagatcatgattccaaagattttaaccgccactccgccacacgctttattcatggactgtacccatgataatgaaactccctttgaaaaaagaacagtggaggatactttgcccaatgctgcattggtggctctttgctcgtccgccattggatctgtttatggctacgacgaaatttttccacatttactgaatttggtcactgaaaaaagacattatgacatttctacgcctactggtagcccctcgataggaataaccaaagtcaaggccactttgaattcgattagaacgagtataggagaaaaggcgtatgacattgaagactcagaaatgcatgtgcatcaccagggccagtacattacttttcatcgtatggatgttaaatccggaaaaggttggtacttgatagcaaggatgaaattttctgacaatgatgaccctaacgagactttaccaccagtggtgttaaaccaatccacctgttctctcaggttttcgtatgctttggaaagagttggcgatgaaattcccaacgacgataaattcattaaaggtattcccacgaaattaaaggagcttgaagggtttgacatttcttatgatgattctaagaagatttcaacgataaaactgcccaatgaattccctcaaggatctattgccatttttgagacccaacagaatggtgtggacgaatccttagatcattttataaggtcaggtgctttaaaggccacttcaagtttgactctagagtcaataaattccgtcttgtatcgtagtgagccggaagaatacgatgttagcgccggcgaaggtggtgcttatattattcctaattttggaaagcctgtgtattgtggtctgcaaggttgggtttccgtattaagaaaaattgtgttttacaatgatttagcacatcccctcagtgcaaatttaagaaatggacattgggctttagactacactatcagtagacttaattactatagcgatgaagcaggaatcaatgaagtgcagaactggctgcgttcaaggtttgatagagtgaaaaagttaccgagctacttagtgcccagttatttcgccttaattatcggcatcctctatggttgttgtcgcttaaaagcaatacagctaatgtcccgtaatattggtaaatctacattgtttgtacaaagcttatctatgacatcaatccagatggtttccagaatgaagtcaacctctattttaccaggcgaaaatgttccatctatggctgcagggttgccacactttagcgtaaactacatgagatgttgggggagagatgtattcatatcgctaagaggtatgctattaacaacaggtagatttgatgaagctaaagctcatatactagcctttgcaaagactttgaagcatggtttaattccaaacttgctggatgccggtagaaacccgagatataatgctcgtgatgctgcctggttcttcttgcaagctgtacaggattatgtttatattgttcctgatggcgaaaaaatattacaagagcaagtaacaaggagattcccactggatgatacttacattcctgtagatgatccaagggcatttagttactctagtaccttggaggagatcatttatgaaattttgagtaggcatgccaagggaattaaattcagagaggctaatgcaggtccaaatttagatcgtgttatgactgataaagggtttaatgttgaaattcatgtcgattggtcgactggcttaattcatggtggatctcagtataactgtggtacttggatggataagatgggtgaaagtgaaaaagcagggtctgttggtattcctggaacacccagagatggagccgcaatagaaatcaatgggcttttaaaaagtgctttaaggtttgttattgaactaaaaaacaagggattgtttaagttttccgatgtggagacgcaggacggcgggaggatcgatttcactgaatggaatcaattacttcaagacaatttcgaaaaaagatattatgttccggaggatccatcacaggatgcagattatgacgtgagcgctaaattgggtgttaatagacgggggatatacagagatttgtacaaatcaggaaagccttatgaagattatcagttaagaccaaattttgctattgccatgactgtggcaccagagttatttgtgcctgagcatgccataaaagcaatcaccattgcagatgaagtcttaagaggtccagtaggtatgcgtactttagacccaagcgattacaattaccgtccgtactacaacaacggagaagattcggatgattttgccacctcaaagggtagaaactatcaccaaggccctgagtgggtctggctttacggctactttttaagagcgttccatcatttccactttaaaaccagtccacgttgtcagaatgctgccaaagagaaaccatcctcttatttgtatcaacaattatactacagattaaaaggccatagaaaatggatttttgaaagtgtgtgggcaggattgacagagctaaccaataaagatggtgaagtatgcaatgactcaagccccacgcaagcctggagttctgcttgtttgttagatctattttatgatttatgggatgcctacgaagatgattcctga

SEQ ID NO: 11774 - DNA, 4611 bp, Artificial Sequence
  Description of Artificial Sequence: Synthetic polynucleotide
atgaatagatctttattattacgtttgagtgataccggtgaacccattacaagctgctcttacggaaaaggtgtcttgacgttaccaccaattccgctccctaaggacgccccaaaggaccaaccgctctatacggtcaagttattggtatctgcaggttcccctgtcgctagggatgggttggtttggactaattgcccaccagatcacaacacgcccttcaagagggacaaattttacaaaaaaatcattcattccagctttcacgaggatgactgcattgacttgaatgtctacgctccaggctcttactgcttttatttatctttcaggaacgataacgaaaaacttgagacaacaaggaaatactactttgttgccttgcccatgctttatataaacgatcagttcttacctttgaattccatcgctttacaaagtgttgtatccaaatggttaggctctgactgggagcccatcttatccaaaattgccgctaaaaactacaatatggtacatttcacccctttgcaggaaagaggcgagtctaactctccttactctatatacgaccaattgcagttcgaccaggaacactttaagtctcctgaagacgtgaaaaatttagttgagcatatacatcgcgatttaaacatgctttctttaacagatattgtttttaaccacacagctaataattctccttggttagttgagcacccggaggctgggtataaccacatcactgcgccacatttgatcagcgccatagagctcgaccaagaattgctcaattttagtaggaatttgaaatcctggggctatcctaccgaattgaaaaatatagaagatctcttcaagatcatggacggtattaaagtgcatgttttagggtctttgaaattatgggaatattatgcggtaaacgtgcaaacagctcttagagatatcaaagcccattggaatgacgaatctaacgaaagttacagttttcccgagaatattaaagacatctcttccgatttcgtaaaattggcttcctttgtgaaggacaacgtcactgagcctaacttcggcactcttggtgaaagaaactccaacaggattaacgtgccaaaatttattcaattattgaagctcattaacgatggtggtagtgatgacagtgaatcttctttggccacggctcaaaacatcttgaacgaggtcaacttacccttatatagagaatacgacgatgatgtcagtgagatactcgagcaattattcaatcgtatcaaatatttgagattagatgacggtgggcccaagcaaggtccagtgaccgttgacgtgcccttaacagagccttattttacgaggttcaaaggaaaagatggtactgattatgccctcgccaacaatggctggatatggaatggtaacccattggtggattttgcatcccagaattctagagcttatttacgtagagaagttatcgtgtggggggactgtgtcaagttaagatacggtaaaagccctgaagactctccgtatttatgggaaagaatgtccaagtatatagaaatgaacgccaagatatttgacgggttcagaattgacaactgccattctactccaatacatgttggcgaatatttcttggatttggcaagaaaatacaacccgaacttatatgtcgttgcagagttattttctggttccgaaacattagattgtttatttgttgaaagattgggtatctcctctttaatcagagaggcaatgcaagcctggtccgaagaagagttgtctagattagtccataagcatggcgggaggcccattggctcctataagtttgttcctatggatgacttctcttatcctgcggatattaatttaaacgaggagcattgtttcaacgactccaacgataactccataagatgtgtatctgagatcatgattccaaagattttaaccgccactccgccacacgctttattcatggactgtacccatgataatgaaactccctttgaaaaaagaacagtggaggatactttgcccaatgctgcattggtggctctttgctcttccgccattggatctgtttatggctacgacgaaatttttccacatttattgaatttggtcactgaaaaaagacattatgacatttctacgcctactggtagcccctccataggaataaccaaagtcaaggccactttgaattctattagaacgagtataggagaaaaggcgtatgacattgaagactctgaaatgcatgtgcatcaccagggccagtacattacttttcatcgtatggatgttaaatccggaaaaggttggtacttgatagcaaggatgaaattttctgacaatgatgaccctaacgagactttaccaccagtggtgttaaaccaatccacctgttctctcaggttttcttatgctttggaaagagttggcgatgaaattcccaacgacgataaattcattaaaggtattcccacgaaattaaaggagcttgaagggtttgacatttcttatgatgattctaagaagatttctacgataaaattgcccaatgaattccctcaaggatctattgccatttttgagacccaacagaatggtgtggacgaatccttagatcattttataaggtctggtgctttaaaggccacttctagtttgactttagagagtataaattccgtcttgtatcgtagtgagccggaagaatacgatgttagcgccggcgaaggtggtgcttatattattcctaattttggaaagcctgtgtattgtggtttacaaggttgggtttccgtattaagaaaaattgtgttttacaatgatttagcacatcccctcagtgcaaatttaagaaatggacattgggctttagactacactatcagtagacttaattactatagcgatgaagcaggaatcaatgaagtgcagaactggcttcgttctaggtttgatagagtgaaaaagttaccgagctacttagtgcccagttatttcgccttaattatcggcatcctctatggttgttgtcgcttaaaagcaatacagttgatgtcccgtaatattggtaaatctacattgtttgtacaaagcttatctatgacatctatccagatggtttccagaatgaagtctacctctattttaccaggcgaaaatgttccatctatggctgcagggttgccacactttagcgtaaactacatgagatgttgggggagagatgtattcatatctttgagaggtatgcttttaacaacaggtagatttgatgaagctaaagctcatatattggcctttgcaaagactttgaagcatggtttaattccaaacttgttggatgccggtagaaacccgagatataatgctcgtgatgctgcctggttcttcttgcaagctgtacaggattatgtttatattgttcctgatggcgaaaaaatattacaagagcaagtaacaaggagattcccattagatgatacttacattcctgtagatgatccaagggcatttagttactctagtaccttggaggagatcatttatgaaattttgagtaggcatgccaagggaattaaattcagagaggctaatgcaggtccaaatttagatcgtgttatgactgataaagggtttaatgttgaaattcatgtcgattggtctactggcttaattcatggtggatctcagtataactgtggtacttggatggataagatgggtgaaagtgaaaaagcagggtctgttggtattcctggaacacccagagatggagccgcaatagaaatcaatgggcttttaaaaagtgctttaaggtttgttattgaattgaaaaacaagggattgtttaagttttccgatgtggagacgcaggacggcgggaggatcgatttcactgaatggaatcaattacttcaagacaatttcgaaaaaagatattatgttccggaggatccatctcaggatgcagattatgacgtgagcgctaaattgggtgttaatagaagagggatatacagagatttgtacaaaagtggaaagccttatgaagattatcagttaagaccaaattttgctattgccatgactgtggcaccagagttatttgtgcctgagcatgccataaaagcaatcaccattgcagatgaagtcttaagaggtccagtaggtatgcgtactttagacccaagcgattacaattaccgtccgtactacaacaacggagaagattctgatgattttgccacctccaagggtagaaactatcaccaaggccctgagtgggtctggctttacggctactttttaagagcgttccatcatttccactttaaaaccagtccacgttgtcagaatgctgccaaagagaaaccatcctcttatttgtatcaacaattatactacagattaaaaggccatagaaaatggatttttgaaagtgtgtgggcaggattgacagagttgaccaataaagatggtgaagtatgcaatgactccagccccacgcaagcctggagttctgcttgtttgttagatttattttatgatttatgggatgcctacgaagatgattcctga

SEQ ID NO: 11775 - DNA, 2217 bp, Saccharomyces cerevisiae
atggttgccgaagaggacatcgagaagcaagtccttcaattgatagacagcttttttctgaagactacactactaatatgctccaccgaatcaagtcgataccagtcttctacagaaaatatattcctatttgacgacacatggtttgaagatcactcagaattagtgagtgagctacccgagataatatcaaaatggtctcactacgatggtcgaaaagagttgccacccttagtggtagagacatatttggatttaagacagttaaactcgtctcatttagttagattaaaggaccacgaaggccatttgtggaacgtttgcaaaggaactaagaagcaggaaatcgtgatggaacgttggcttatcgaattagataattcatccccaactttcaaatcatacagtgaagatgagactgatgttaatgaactttctaaacagctagtccttctcttccgttatttgttgactttaatacagttactacccacaacagaattataccaattattaataaagtcttataacggcccgcaaaatgaaggaagttccaatccaataacttccacgggcccactagtaagtatccggacgtgtgtccttgacggatctaaaccaattttatcgaaggggagaatagggttgagcaaaccgattattaatacatattccaatgcgcttaacgaatcaaacctgccagcccatttagatcaaaagaagatcacacctgtatggacaaagtttggactcttaagagtctcggtatcatacagacgtgattggaagtttgaaattaacaatacaaacgacgaattattttcagctcgacatgcatctgtctcacataactcacaaggaccccagaatcagccagaacaagaaggacaaagtgatcaagacatagggaaacgccaaccacaatttcaacagcagcagcagccccaacagcagcagcagcagcagcaacagcaacagagacaacaccaggtccagacacaacaacaaagacagatacctgataggagatctctttcactttctccttgtacaagagccaattcttttgaaccacaatcttggcagaagaaagtctatccaatatcgagacctgttcaaccatttaaagttggttcaattggaagtcaaagtgcgagcagaaatccctctaattcatcgtttttcaaccaaccacctgttcataggccaagtatgagctccaactacgggccacaaatgaatattgaaggtaccagtgttggaagcacctcaaagtattcctcctcctttgggaacattcgtcgtcactcaagtgtaaagacgacagagaatgctgaaaaagtatcaaaagctgtaaagagcccactacaacctcaagaatcacaagaagatttaatggattttgttaaattactcgaagaaaaacccgatctaactataaagaagacaagtggaaataatccacccaatatcaatatttctgattctctaatcagatatcagaatttgaagccaagtaatgacttattaagtgaagatttatccgtaagtttatccatggatccaaatcatacatatcacagaggcagatcagattcccactcaccattgccttcaatatccccttcgatgcattatggatcgttgaactcgagaatgtctcaaggcgccaatgcaagccatttgattgcaagaggcggtgggaattcatctactagtgccttgaatagtagaaggaattctttagataagagctcaaacaagcagggtatgtcaggcttacctcctatttttggtggagagagtacttcatatcaccacgacaacaaaatacaaaagtacaaccaattaggagtagaagaagatgatgatgacgagaatgaccgtttgctcaaccaaatgggaaacagtgctacaaaattcaaaagttcaatatctccaagatcaattgatagcatttcaagttctttcataaaaagtaggatacctatcagacaaccataccattactctcaaccaactactgcgccctttcaagctcaggcgaaatttcataaacctgcaaataagttaatcgataatggtaataggagtaatagtaacaataacaatcataatgggaatgatgcagttggtgtgatgcataatgacgaggatgatcaagatgatgatctagtatttttcatgagtgatatgaacctttctaaagaaggttaa

SEQ ID NO: 11776 - DNA, 2217 bp, Artificial Sequence
  Description of Artificial Sequence: Synthetic polynucleotide
atggttgccgaagaggacatcgagaagcaagtccttcaattgatagacagcttttttttgaagactacattgttaatatgctccaccgaaagtagtagataccagtcttctacagaaaatatattcttatttgacgacacatggtttgaagatcacagtgaattagtgagtgagttgcccgagataatatccaaatggtctcactacgatggtagaaaagagttgccacccttagtggtagagacatatttggatttaagacagttaaactcttctcatttagttagattaaaggaccacgaaggccatttgtggaacgtttgcaaaggaactaagaagcaggaaatcgtgatggaacgttggcttatcgaattagataattcttccccaactttcaaatcttacagtgaagatgagactgatgttaatgaactttctaaacagttggtccttctcttccgttatttgttgactttaatacagttattgcccacaacagaattataccaattattaataaagtcttataacggcccgcaaaatgaaggaagttccaatccaataacttccacgggcccattagtaagtatcaggacgtgtgtccttgacggatctaaaccaattttatccaaggggagaatagggttgagcaaaccgattattaatacatattccaatgcgcttaacgaatctaacttaccagcccatttagatcaaaagaagatcacacctgtatggacaaagtttggactcttaagagtctccgtatcttacagacgtgattggaagtttgaaattaacaatacaaacgacgaattattttctgctagacatgcatctgtctctcataactctcaaggaccccagaatcagccagaacaagaaggacaaagtgatcaagacatagggaaacgccaaccacaatttcaacagcagcagcagccccaacagcagcagcagcagcagcaacagcaacagagacaacaccaggtccagacacaacaacaaagacagatacctgataggagatctctttctctttctccttgtacaagagccaattcttttgaaccacaatcttggcagaagaaagtctatccaatatctagacctgttcaaccatttaaagttggttccattggaagtcaaagtgcgagcagaaatccctctaattcttcttttttcaaccaaccacctgttcataggccaagtatgagctccaactacgggccacaaatgaatattgaaggtaccagtgttggaagcacctccaagtattcctcctcctttgggaacattcgtcgtcacagcagtgtaaagacgacagagaatgctgaaaaagtatccaaagctgtaaagagcccattgcaacctcaagaatctcaagaagatttaatggattttgttaaattactcgaagaaaaacccgatttgactataaagaagacaagtggaaataatccacccaatatcaatatttctgattctttgatcagatatcagaatttgaagccaagtaatgacttattaagtgaagatttatccgtaagtttatccatggatccaaatcatacatatcacagaggcagaagtgattcccactctccattgccttccatatccccttctatgcattatggatctttgaactctagaatgtctcaaggcgccaatgcaagccatttgattgcaagaggcggtgggaattcttctactagtgccttgaatagtagaaggaattctttagataagagcagtaacaagcagggtatgagtggcttacctcctatttttggtggagagagtacttcttatcaccacgacaacaaaatacaaaagtacaaccaattaggagtagaagaagatgatgatgacgagaatgaccgtttgctcaaccaaatgggaaacagtgctacaaaattcaaaagtagtatatctccaagatctattgatagcatttccagttctttcataaaaagtaggatacctatcagacaaccataccattactctcaaccaactactgcgccctttcaagctcaggcgaaatttcataaacctgcaaataagttaatcgataatggtaataggagtaatagtaacaataacaatcataatgggaatgatgcagttggtgtgatgcataatgacgaggatgatcaagatgatgatttagtatttttcatgagtgatatgaacctttctaaagaaggttga

SEQ ID NO: 11777 - DNA, 1290 bp, Saccharomyces cerevisiae
atgggaggagaggttctaaataatgaaggaatgccactggccgaacttaaacaggagaccattcccatatcacgatcagagagttcagaatcattgaacagtttaacatcaactagaagctcatcgagcaataggccaaagacatatttctgtgactatgatggctgtgataaggcatttacaagaccttcaattttgactgaacaccaattaagcgtacatcagggtttaagagcatttcagtgtgataagtgtgcaaaatccttcgttaaaaagagtcacttagagagacacttgtatacgcattctgatacgaaaccattccaatgttcttattgtggaaaaggagtgacgactcgccagcaactgaagcgacacgaagtaacgcataccaaatctttcatttgtccagaggaaggatgcaacctccgattctacaagcatccacaattaagggcacatattttatctgttcatttacataaactaacctgtccacactgcaataaaagctttcagaggccatataggctaagaaatcacatttctaaacatcacgatcctgaggtagaaaatccttaccaatgtacttttgctggttgttgcaaagagtttcggatatggtcacaattgcaatcgcatataaaaaatgatcatcctaaattaaaatgtcctatttgtagcaaaccatgtgtgggggaaaatggtttacaaatgcacatgattattcatgacgactcactagtaaccaaaaattggaagtgtcatatatgtcctgatatgtctttttctagaaaacatgatcttctcacgcattatgggtctattcatacggaagaagatatcccactggaactaaaatataaaatttctgatattcaacaacttgtccaagaccacggagttcaactggggaatagcaaacactcgaatgagcaggatgaagagaagatttccaataggttgaggaaaaggagaaaacttaccgaaaacaataatgtagagtttttacagaatgaagtggatttagaaaagcgacttgagtctggtgaaaatgggctaaaccttttattgaataccgttggaagaaaatacagatgcttttacaataattgttctaggactttcaagacaaaggaaaaatacgagaaacatatagacaagcacaaagtacatgagctaaagttaaaaatattacaggaaaaggaagaaaataaaacgctagtggaccagaaccataaggaaccttttataattcaaaaggaaacgcagtcagcgggtgacaaataa

SEQ ID NO: 11778 - DNA, 1290 bp, Artificial Sequence
  Description of Artificial Sequence: Synthetic polynucleotide
atgggaggagaggttttgaataatgaaggaatgccattggccgaacttaaacaggagaccattcccatatctagaagtgagagttctgaatctttgaacagtttaacatctactagaagctcctctagcaataggccaaagacatatttctgtgactatgatggctgtgataaggcatttacaagaccttctattttgactgaacaccaattaagcgtacatcagggtttaagagcatttcagtgtgataagtgtgcaaaatccttcgttaaaaagagtcacttagagagacacttgtatacgcattctgatacgaaaccattccaatgttcttattgtggaaaaggagtgacgactcgccagcaattgaagagacacgaagtaacgcataccaaatctttcatttgtccagaggaaggatgcaacctcaggttctacaagcatccacaattaagggcacatattttatctgttcatttacataaattgacctgtccacactgcaataaaagctttcagaggccatataggttaagaaatcacatttctaaacatcacgatcctgaggtagaaaatccttaccaatgtacttttgctggttgttgcaaagagtttagaatatggtctcaattgcaatctcatataaaaaatgatcatcctaaattaaaatgtcctatttgtagcaaaccatgtgtgggggaaaatggtttacaaatgcacatgattattcatgacgactctttagtaaccaaaaattggaagtgtcatatatgtcctgatatgtctttttctagaaaacatgatcttctcacgcattatgggtctattcatacggaagaagatatcccattggaattgaaatataaaatttctgatattcaacaacttgtccaagaccacggagttcaattagggaatagcaaacactctaatgagcaggatgaagagaagatttccaataggttgaggaaaaggagaaaacttaccgaaaacaataatgtagagtttttacagaatgaagtggatttagaaaagagacttgagtctggtgaaaatgggttgaaccttttattgaataccgttggaagaaaatacagatgcttttacaataattgttctaggactttcaagacaaaggaaaaatacgagaaacatatagacaagcacaaagtacatgagttgaagttaaaaatattacaggaaaaggaagaaaataaaacgttagtggaccagaaccataaggaaccttttataattcaaaaggaaacgcagtctgcgggtgacaaatga

SEQ ID NO: 11779 - DNA, 468 bp, Saccharomyces cerevisiae
atgtcagactacgaggaggcgtttaacgacggtaatgagaacttcgaagattttgatgtagagcatttttctgatgaggagacttatgaggaaaaacctcaattcaaggatggtgaaacaaccgatgccaacggtaagaccatcgttactggtggtaatggcccagaagattttcaacagcatgagcaaataagaagaaagacacttaaggaaaaggccatcccaaaagaccaaagagcaactactccatacatgaccaaatatgaaagggcaagaattttaggtacaagagccctacaaatttccatgaatgcgccagtttttgtagatttagaaggtgaaactgatccattgcgtattgccatgaaggagttggctgaaaagaaaattcctttggttattagaagatatttaccagatggttcctttgaggactggagtgtggaggaactcattgtggatttgtga

SEQ ID NO: 11780 - DNA, 468 bp, Artificial Sequence
  Description of Artificial Sequence: Synthetic polynucleotide
atgtctgactacgaggaggcgtttaacgacggtaatgagaacttcgaagattttgatgtagagcatttttctgatgaggagacttatgaggaaaaacctcaattcaaggatggtgaaacaaccgatgccaacggtaagaccatcgttactggtggtaatggcccagaagattttcaacagcatgagcaaataagaagaaagacacttaaggaaaaggccatcccaaaagaccaaagagcaactactccatacatgaccaaatatgaaagggcaagaattttaggtacaagagccttgcaaatttccatgaatgcgccagtttttgtagatttagaaggtgaaactgatccattgcgtattgccatgaaggagttggctgaaaagaaaattcctttggttattagaagatatttaccagatggttcctttgaggactggagtgtggaggaactcattgtggatttgtga

SEQ ID NO: 11781 - DNA, 492 bp, Saccharomyces cerevisiae
atggaccatagtgaatcgctaacgtttaaccaacttacgcaggactacataaataaactcaaagatgctttccaaatgctggatgaggatgaggatggtctgattagtaggggagatcttaccaagatatatgcaacattggggaagacattgacagatgaggaatggtccaaaatggtacctgacaatgacaccagtaccgcggaagttggagaagaaggtgtaagctttcccatattcttatctatcatggggaagaacttatcgcagtttcccgagcgtgaagaattggaagaaagtttaaaagccattggaagaggacacgatttaaacgttcccttgaatgaggtcattgattctttaaaggaagccggttttgaaaatcctgaggaagaatttgctaaacttttcaaattgtttactacaaatcagcaagcgaccgaagagagaactttcagaggtaagcttttcttagattcaatcaccgattaa

SEQ ID NO: 11782 - DNA, 492 bp, Artificial Sequence
  Description of Artificial Sequence: Synthetic polynucleotide
atggaccatagtgaatctttgacgtttaaccaacttacgcaggactacataaataaactcaaagatgctttccaaatgcttgatgaggatgaggatggtttgattagtaggggagatcttaccaagatatatgcaacattggggaagacattgacagatgaggaatggtccaaaatggtacctgacaatgacaccagtaccgcggaagttggagaagaaggtgtaagctttcccatattcttatctatcatggggaagaacttatctcagtttcccgagcgtgaagaattggaagaaagtttaaaagccattggaagaggacacgatttaaacgttcccttgaatgaggtcattgattctttaaaggaagccggttttgaaaatcctgaggaagaatttgctaaacttttcaaattgtttactacaaatcagcaagcgaccgaagagagaactttcagaggtaagcttttcttagattctatcaccgattga

SEQ ID NO: 11783 - DNA, 4299 bp, Saccharomyces cerevisiae
atgtcggatattaaacagctattgaaggaagccaaacaagaattgacaaatcgtgactatgaagagaccatcgaaatatcggaaaaggttcttaaactagatcccgataattatttcgcacatatttttctagggaaagcactttcgagtcttccagctagtaataatgtcagttcaaatcggaacctggagagagctactaatcattacgtgtccgctgccaaattagttcctgataaccttttagcgtggaaaggactttttctcttatttagaaccactgaggttgtcccagacatactttcgtatgatgaatattttgacctgtgtggccaatatgcagacgcacttttaaagcaggaacagtctcaagtagaactaataaatgacataaaattactaaagaaaacgcatccagattgtcaaaaagccttttatcagcatttgaaacctgggtcgctaatggcggaaactattggtcgtcatctatctacaccccaggacgctttattaaatcttataaagatactgtctaatattgaaacaacggaaataggtaagacccttagtcagaacaggttaaaactaaaagctagtgatcctgattatcaaattaaactaaattcattctcctgggaaataattaaaaattcagaaattgatcagttatacaaccagttggtaaatattctcgctgacgatcaaaagagaagtgaaattgagaaccagtggttagaatatagaatcaaagtgctaaaatcaatgccgctggatgtaaaaaaagattttttcacgaaagttaaggaaatggtcgaggatatggttcttgtgaatcatcaatctttgcttgcatggcaaaagtatttcgaatggacagattacgaagatctggacaacatggatgccccattgataataaagtactttaagaaatttcctaaagatccattggccatgatcctctattcctggctttcctcaaaactatcgaaatatgatattaaaagtttggaatcggctaataaaccacctgaaggccataaaaagacggagaaggaaacagatattaaggatgtagatgagacaaatgaagatgaagttaaagatcgcgttgaagatgaagttaaagatcgtgttgaagatgaagtcaaagatcaagatgaggaggcaaaggaagatgaagaagaagaccttgatgatatagaaattggtttattagaggaagaggttgtcactgtattgacggagaatatcgtaaaatgtaaaaataatatcttagcgcatcgcattctttgtcaatattacctactgaccaaggagtatgaggcagctttaccatacatcaaaaatggtatttctttaattgcctataatataaaggacctgggggtacatttgccattaacaaaaagagaattttctctggatttggctaccgtttatacatatgtcgatgccccaaaggaccacaatgctgcattaaagttatatgataacattttatccggtgattttagtaatatacaagcaaaaatgggcaaaggtataatttttattgaaaggaaaaattggaaggatgctatgacattactaacacaggtgcatgaacaatcgcctaataatctggaagttttatctgaactgtcatggagtaaagcccatatgggttatatggacgaggcattagctggcttagatactgtcatcaagggtatcaaaggtatggatttacgttcgatagatttcagagcattaaacttatggaggcaagccaaagtttacattatgaagcatgcttccattaacgatgctaaacaggaaaacgtcaagtgcgcattcaaattactcattcagagtattaaaatattggacacttttgctcccggattttcgacactgggcgatatttattgccactattataaagaccatttgagggccttcaaatgttatttcaaagctttcgatctggatgcgggggattacacagcagcgaagtatattaccgaaacttatgcaagcaagcccaattggcaagctgcttcttccatcgcttcaagattaattaaaggtgaaaaagcaaaggcagaactgcgctcaaataactggccctttagggtcgtagggattgctcatttggaaaagcaagaagaaagtgattctattgagtggtttcaatctgctttacgtgttgatccaaatgatgtagagtcatgggtgggcctgggacaagcataccacgcgtgtggtcgtatagaagcatctatcaaagtttttgacaaggcaattcaattaaggccctctcatacttttgcccaatactttaaagctatttctctatgtgacgtaggtgaatatcttgaaagtttagacattctggaaaaggtatgtcaagaagccgctacagaagagtcattccaaattggtttagtggaagtgcttatgagatgttccttggatttatattcgcaagggttcttgctcaaatcagtttcaattgcaaaggacactattgaacggatcaagataattatcagtgaattaaaatgtgagaaccaacaggtttggatctacctttcacaagtactgagattatttatttggatagagtcaaaggttgatactttacctgttgaatcactagtatcaatttttgaaaattctcaattttctggtagtgaagaaattgattctgtcgacaatatcaaaatcgatactttactcgatagcactactgatgataatgtgtccattgcgtgcaagtttttgatcttagcttcaaaatatagtgtttcggatcaaaaatttacagatatagcaggaacggtcagggcctcatactggtataatataggtatctcagagcttactgctttcataacattgaaagaaccgcagtatagagatgctgctatttttgcttttaagaaatccattcaattacagtctaatacaagtgaaacttggattggtctagggatagccactatggacatcaactttcgtgtctctcaacattgctttattaaagcaactgctttggaaccgaaggcgacaaatacatggttcaacttggctatgctaggtttaaagaaaaaggatactgaatttgctcaacaggttctgaataaattacaaagccttgccccacaagattcgtcaccttggctaggtatggccttgattcttgaggaacaaggagacattatcggaagttctaaactttttgcacactccttcatattatctaatggaaggtcaaaggctgcgcaatttatgtatgctaaaaatgtccttgagaatcacattaataatggtgacgatgaaagagatattgagacagtggaaaaactaaccactgcttcaatagctttagagcagtttttcaaaaaaagtcctgatagtcaatttgctcttcaatgtgctcttctaactcttgaaaggttacatcactatgaaaatgcaaacgaactggctaatcggttgataggcattttggaaaaaaagtttgagaaaactcaagatgaaagagaactgtttaattttgcgataattaaaggacaattcgctcgtattcacttaggtttaggaaatttcgaactctctattgaaaacgctgatctttctcaaggtattatatctgaatcgagcgacgaaaaatcaatgaaaaccaaaatatccaatcacatttgcttaggattaagttatttcttcttaaacgactttgatcagactttgaaccaattccaagaactgctaagcatttcaaaggattctaagcacctagttgttttaattgcgaaggtgctttatgatgtaggtgaatctgacacaaaggaaattgctttacaggaactaacagaatatatagccacaagcggcgcagacttgttagtaacactaacgattgcagctatgtcaattctagacgataagcgtgaagatttaagcattattttagaagaattgaaagctttgccattatccaaacaaataatagataagcacaaagacgcaccatatctgatagaagaaattactaagagactttatcgtaacgataccggtaaacaagtatggcaaaggagtgcgtactttttccctaataacctcaaggtttgggagagattagataagaatattcaacgaagaatagcttctaatggacaaaataaagttactgcggaggagatgagtaaactatattgtgagagtaagaatttgagaagcatacaaagaggtatgtttttgtgcccttggaacgttactgcagtgaaggcgctaaacgaatgtttctaa

SEQ ID NO: 11784 - DNA, 4299 bp, Artificial Sequence
  Description of Artificial Sequence: Synthetic polynucleotide
atgagtgatattaaacagttattgaaggaagccaaacaagaattgacaaatcgtgactatgaagagaccatcgaaatatctgaaaaggttcttaaattggatcccgataattatttcgcacatatttttttggggaaagcactttccagtcttccagctagtaataatgtcagtagtaatagaaacttggagagagctactaatcattacgtgtccgctgccaaattagttcctgataaccttttagcgtggaaaggactttttctcttatttagaaccactgaggttgtcccagacatactttcctatgatgaatattttgacttatgtggccaatatgcagacgcacttttaaagcaggaacagtctcaagtagaattgataaatgacataaaattattgaagaaaacgcatccagattgtcaaaaagccttttatcagcatttgaaacctgggtctttgatggcggaaactattggtcgtcatttatctacaccccaggacgctttattaaatcttataaagatattatctaatattgaaacaacggaaataggtaagacccttagtcagaacaggttaaaattgaaagctagtgatcctgattatcaaattaaattgaattctttctcctgggaaataattaaaaattctgaaattgatcagttatacaaccagttggtaaatattctcgctgacgatcaaaagagaagtgaaattgagaaccagtggttagaatatagaatcaaagtgttgaaatctatgccgttagatgtaaaaaaagattttttcacgaaagttaaggaaatggtcgaggatatggttcttgtgaatcatcaatctttgcttgcatggcaaaagtatttcgaatggacagattacgaagatttggacaacatggatgccccattgataataaagtactttaagaaatttcctaaagatccattggccatgatcctctattcctggctttcctctaaattatccaaatatgatattaaaagtttggaatctgctaataaaccacctgaaggccataaaaagacggagaaggaaacagatattaaggatgtagatgagacaaatgaagatgaagttaaagatcgcgttgaagatgaagttaaagatcgtgttgaagatgaagtcaaagatcaagatgaggaggcaaaggaagatgaagaagaagaccttgatgatatagaaattggtttattagaggaagaggttgtcactgtattgacggagaatatcgtaaaatgtaaaaataatatcttagcgcatcgcattctttgtcaatattacttgttgaccaaggagtatgaggcagctttaccatacatcaaaaatggtatttctttaattgcctataatataaaggacttgggggtacatttgccattaacaaaaagagaattttctttagatttggctaccgtttatacatatgtcgatgccccaaaggaccacaatgctgcattaaagttatatgataacattttatccggtgattttagtaatatacaagcaaaaatgggcaaaggtataatttttattgaaaggaaaaattggaaggatgctatgacattattaacacaggtgcatgaacaaagtcctaataatttggaagttttatctgaattatcttggagtaaagcccatatgggttatatggacgaggcattagctggcttagatactgtcatcaagggtatcaaaggtatggatttacgttctatagatttcagagcattaaacttatggaggcaagccaaagtttacattatgaagcatgcttccattaacgatgctaaacaggaaaacgtcaagtgcgcattcaaattactcattcagagtattaaaatattggacacttttgctcccggattttctacattaggcgatatttattgccactattataaagaccatttgagggccttcaaatgttatttcaaagctttcgatttggatgcgggggattacacagcagcgaagtatattaccgaaacttatgcaagcaagcccaattggcaagctgcttcttccatcgcttccagattaattaaaggtgaaaaagcaaaggcagaattacgcagtaataactggccctttagggtcgtagggattgctcatttggaaaagcaagaagaaagtgattctattgagtggtttcaatctgctttacgtgttgatccaaatgatgtagagagttgggtgggcttgggacaagcataccacgcgtgtggtcgtatagaagcatctatcaaagtttttgacaaggcaattcaattaaggccctctcatacttttgcccaatactttaaagctatttctttatgtgacgtaggtgaatatcttgaaagtttagacattttggaaaaggtatgtcaagaagccgctacagaagagagtttccaaattggtttagtggaagtgcttatgagatgttccttggatttatattctcaagggttcttgctcaaatctgtttctattgcaaaggacactattgaaagaatcaagataattatcagtgaattaaaatgtgagaaccaacaggtttggatctacctttctcaagtattaagattatttatttggatagagtctaaggttgatactttacctgttgaatctttagtatctatttttgaaaattctcaattttctggtagtgaagaaattgattctgtcgacaatatcaaaatcgatactttactcgatagcactactgatgataatgtgtccattgcgtgcaagtttttgatcttagcttccaaatatagtgtttctgatcaaaaatttacagatatagcaggaacggtcagggcctcttactggtataatataggtatctctgagcttactgctttcataacattgaaagaaccgcagtatagagatgctgctatttttgcttttaagaaatccattcaattacagtctaatacaagtgaaacttggattggtttggggatagccactatggacatcaactttcgtgtctctcaacattgctttattaaagcaactgctttggaaccgaaggcgacaaatacatggttcaacttggctatgttgggtttaaagaaaaaggatactgaatttgctcaacaggttttgaataaattacaaagccttgccccacaagattcttctccttggttaggtatggccttgattcttgaggaacaaggagacattatcggaagttctaaactttttgcacactccttcatattatctaatggaaggtctaaggctgcgcaatttatgtatgctaaaaatgtccttgagaatcacattaataatggtgacgatgaaagagatattgagacagtggaaaaattgaccactgcttctatagctttagagcagtttttcaaaaaaagtcctgatagtcaatttgctcttcaatgtgctcttttgactcttgaaaggttacatcactatgaaaatgcaaacgaattggctaatagattgataggcattttggaaaaaaagtttgagaaaactcaagatgaaagagaattatttaattttgcgataattaaaggacaattcgctcgtattcacttaggtttaggaaatttcgaactctctattgaaaacgctgatctttctcaaggtattatatctgaaagtagcgacgaaaaatctatgaaaaccaaaatatccaatcacatttgcttaggattaagttatttcttcttaaacgactttgatcagactttgaaccaattccaagaattattaagcatttccaaggattctaagcacttggttgttttaattgcgaaggtgctttatgatgtaggtgaatctgacacaaaggaaattgctttacaggaattaacagaatatatagccacaagcggcgcagacttgttagtaacattaacgattgcagctatgtctattttggacgataagcgtgaagatttaagcattattttagaagaattgaaagctttgccattatccaaacaaataatagataagcacaaagacgcaccatatttgatagaagaaattactaagagactttatcgtaacgataccggtaaacaagtatggcaaaggagtgcgtactttttccctaataacctcaaggtttgggagagattagataagaatattcaaagaagaatagcttctaatggacaaaataaagttactgcggaggagatgagtaaactttattgtgagagtaagaatttgagaagcatacaaagaggtatgtttttgtgcccttggaacgttactgcagtgaaggcgttgaacgaatgtttctga

SEQ ID NO: 11785 - DNA, 1965 bp, Saccharomyces cerevisiae
atggacgagttactgggagaagcgcttagtgcagagaaccaaacaggtgagagcactgtcgaatctgagaagttggtcacccccgaagatgttatgaccatatcatccttggaacagagaaccttgaatcccgatttgtttctttacaaagagttggtgaaggcacatctgggtgaaagagcagcttctgtaattgggatgttggttgcgctgggcagattgagtgtgcgcgagttagtggagaaaatagatggtatggatgtagacagcgtcaagacgacactagtctcattaactcaattaaggtgtgttaagtacctgcaagaaacagcaatatccgggaaaaaaacgacttattattactataacgaggaagggatacacattttactctactcagggttgattattgacgaaattattacgcaaatgcgtgtaaacgacgaagaggagcataaacagctggtggctgaaattgtacaaaacgttatatcattagggtccttaacagtggaagattatctaagtagtgtcacgtcagattccatgaagtacaccatttcatcactattcgtgcaactgtgtgaaatgggatatcttattcaaatatcaaaattgcattataccccaatcgaagatctctggcaatttttatatgaaaaacattacaaaaatattcccagaaactccccgttgtccgatttgaagaaaagatcccaagccaagatgaatgcgaaaactgattttgccaaaatcataaataaaccaaatgagctttcacaaatcttaacggttgatccaaagacctcattgaggattgttaaacctacagtctctctgacgattaatttggatagatttatgaaaggtagaagatctaaacaattgattaacttggccaagacaagagtcggctccgtcacagctcaagtttacaaaattgcattaagactcacagagcaaaagtctcctaaaattagagatccactaactcaaactgggcttttacaagatttggaggaagcaaaatcgtttcaagacgaagccgaacttgttgaggagaagacaccagggcttacctttaatgctattgacttggcaagacatctccccgcagaattggacttgcgtggaagcttattatctagaaagccctctgacaataaaaagcgttctggctcaaacgctgctgcatcattacccagtaaaaaattaaaaaccgaagatggatttgtgatcccggcgctacctgctgctgtttccaaatctcttcaagaaagtggagatacacaagaagaagacgaagaggaggaggatttggatgcagacactgaggatcctcactcagcttctttgataaatagtcatttaaaaatcctagcatcatcaaatttcccctttttgaacgaaaccaaaccaggtgtttactatgttccatatagcaaactaatgccagtattaaagtcatctgtttatgagtatgttatcgcgtctacgttgggaccctcagcaatgcgtttaagccgttgtattcgtgataacaagctggtgtctgagaaaattatcaactcaactgcgttaatgaaggaaaaggatataagatctacattagcatctttaattagatacaattctgtggaaatccaggaagttccaagaacagccgatagatcagcatcaagggcagtttttttgtttagatgcaaagaaacgcattcctataatttcatgagacaaaacttggaatggaatatggcaaatttactttttaaaaaggagaaattaaagcaagaaaactctacattattaaaaaaggcaaatagagatgatgttaaaggaagagagaacgaactactattaccaagcgaattgaatcaattaaagatggtcaatgaaagagagctaaatgttttcgctcgtttatcgaggttgctatcgctttgggaagttttccaaatggcatga

SEQ ID NO: 11786 - DNA, 1965 bp, Artificial Sequence
  Description of Artificial Sequence: Synthetic polynucleotide
atggacgagttattaggagaagcgcttagtgcagagaaccaaacaggtgagagcactgtcgaatctgagaagttggtcacccccgaagatgttatgaccatatcttccttggaacagagaaccttgaatcccgatttgtttctttacaaagagttggtgaaggcacatttaggtgaaagagcagcttctgtaattgggatgttggttgcgttgggcagattgagtgtgcgcgagttagtggagaaaatagatggtatggatgtagacagcgtcaagacgacattggtctctttaactcaattaaggtgtgttaagtacttacaagaaacagcaatatccgggaaaaaaacgacttattattactataacgaggaagggatacacattttactctactctgggttgattattgacgaaattattacgcaaatgcgtgtaaacgacgaagaggagcataaacagttggtggctgaaattgtacaaaacgttatatctttagggtccttaacagtggaagattatttgagtagtgtcacgtctgattccatgaagtacaccatttcttctttattcgtgcaattatgtgaaatgggatatcttattcaaatatccaaattgcattataccccaatcgaagatctctggcaatttttatatgaaaaacattacaaaaatattcccagaaactccccgttgtccgatttgaagaaaagatcccaagccaagatgaatgcgaaaactgattttgccaaaatcataaataaaccaaatgagctttctcaaatcttaacggttgatccaaagacctctttgaggattgttaaacctacagtctctttgacgattaatttggatagatttatgaaaggtagaagatctaaacaattgattaacttggccaagacaagagtcggctccgtcacagctcaagtttacaaaattgcattaagactcacagagcaaaagtctcctaaaattagagatccattgactcaaactgggcttttacaagatttggaggaagcaaaaagttttcaagacgaagccgaacttgttgaggagaagacaccagggcttacctttaatgctattgacttggcaagacatctccccgcagaattggacttgcgtggaagcttattatctagaaagccctctgacaataaaaagcgttctggctctaacgctgctgcatctttacccagtaaaaaattaaaaaccgaagatggatttgtgatcccggcgttacctgctgctgtttccaaatctcttcaagaaagtggagatacacaagaagaagacgaagaggaggaggatttggatgcagacactgaggatcctcactctgcttctttgataaatagtcatttaaaaatcttggcatcttccaatttcccctttttgaacgaaaccaaaccaggtgtttactatgttccatatagcaaattaatgccagtattaaagtcttctgtttatgagtatgttatcgcgtctacgttgggaccctctgcaatgcgtttaagccgttgtattcgtgataacaagttagtgtctgagaaaattatcaactctactgcgttaatgaaggaaaaggatataagatctacattagcatctttaattagatacaattctgtggaaatccaggaagttccaagaacagccgatagaagtgcaagcagggcagtttttttgtttagatgcaaagaaacgcattcctataatttcatgagacaaaacttggaatggaatatggcaaatttactttttaaaaaggagaaattaaagcaagaaaactctacattattaaaaaaggcaaatagagatgatgttaaaggaagagagaacgaattattattaccaagcgaattgaatcaattaaagatggtcaatgaaagagagttgaatgttttcgctcgtttatctaggttgctttctctttgggaagttttccaaatggcatga

SEQ ID NO: 11787 - DNA, 1107 bp, Saccharomyces cerevisiae
atgttgtcagcagctagattgcaatttgcccaggggtcagttagaaggttgaccgtttccgctagagacgcacctactaaaatatctacattggctgttaaggtccatggagggtctcgttatgcaaccaaggatggtgtggcccatcttttaaacagattcaactttcaaaacacgaacactagatcagctttgaaattagtcagagaatccgaattattagggggaacttttaagtctaccttggatagggaatacatcactttgaaagctacctttttgaaggacgaccttccctactacgtcaatgccctagcagacgtgctatacaagactgccttcaaacctcacgagctcaccgaatctgttttgcctgctgctagatacgattatgcggtcgctgaacaatgtccggtaaagagcgccgaagaccaattgtatgccattacattcagaaagggtttaggaaacccattgttatacgatggtgtggaaagagtcagtttgcaagatatcaaggactttgcggacaaagtctataccaaggagaaccttgaagttagcggtgaaaatgttgttgaggccgatttgaaaagatttgttgacgagtcactgttaagcactttgcctgcaggtaagtcattggtgagtaaatccgaaccaaaattctttttgggtgaagaaaacagggtaaggtttatcggtgactccgttgccgccattggtatcccggtaaacaaagcctccctagctcaatatgaagtattggccaactatttgacctctgccctatccgagctttccggtttaatcagctcggctaaacttgataaattcactgacggcggcctatttactctgtttgtaagagaccaggacagcgccgtggtatcttccaacatcaagaaaattgttgcggatttgaagaagggcaaggacttatcccctgcaataaattacacaaagttaaagaatgccgtccaaaatgaatctgtttccagcccaattgaactaaattttgacgccgtgaaggactttaagttgggaaaattcaactatgtagccgtcggtgatgtttccaacttgccatatttggacgaattgtaa

SEQ ID NO: 11788 - DNA, 1107 bp, Artificial Sequence
  Description of Artificial Sequence: Synthetic polynucleotide
atgttgagtgcagctagattgcaatttgcccaggggtctgttagaaggttgaccgtttccgctagagacgcacctactaaaatatctacattggctgttaaggtccatggagggtctcgttatgcaaccaaggatggtgtggcccatcttttaaacagattcaactttcaaaacacgaacactagatctgctttgaaattagtcagagaatccgaattattagggggaacttttaagtctaccttggatagggaatacatcactttgaaagctacctttttgaaggacgaccttccctactacgtcaatgccttggcagacgtgttatacaagactgccttcaaacctcacgagctcaccgaatctgttttgcctgctgctagatacgattatgcggtcgctgaacaatgtccggtaaagagcgccgaagaccaattgtatgccattacattcagaaagggtttaggaaacccattgttatacgatggtgtggaaagagtcagtttgcaagatatcaaggactttgcggacaaagtctataccaaggagaaccttgaagttagcggtgaaaatgttgttgaggccgatttgaaaagatttgttgacgagtctttattaagcactttgcctgcaggtaagtctttggtgagtaaatccgaaccaaaattctttttgggtgaagaaaacagggtaaggtttatcggtgactccgttgccgccattggtatcccggtaaacaaagcctccttggctcaatatgaagtattggccaactatttgacctctgccctttccgagctttccggtttaatcagcagtgctaaacttgataaattcactgacggcggcttatttactttatttgtaagagaccaggacagcgccgtggtatcttccaacatcaagaaaattgttgcggatttgaagaagggcaaggacttatcccctgcaataaattacacaaagttaaagaatgccgtccaaaatgaatctgtttccagcccaattgaattgaattttgacgccgtgaaggactttaagttgggaaaattcaactatgtagccgtcggtgatgtttccaacttgccatatttggacgaattgtga

SEQ ID NO: 11789 - DNA, 918 bp, Saccharomyces cerevisiae
atgtcttcgaacgattcgaacgataccgacaagcaacatacacgtctggatcctaccggtgtggacgacgcctacatccctccggagcagccggaaacaaagcaccatcgctttaaaatctctagggacaccctgagagaccactttatcgctgcggtcggtgagttctgcggcacattcatgtttttatggtgcgcttacgttatctgcaatgtcgctaaccatgatgtcgcactcgttgcagcgcctgacggttcccatccgggtcaattgattatgattgccatcggtttcggattttccgtcatgttttctatctggtgttttgccggtgtctctggtggggctttgaatcctgctatgtcgctttcgctgtgcttggcgagagccgtctctcctacaagatgtgtcgttatgtgggtttcgcagattgttgctggaatggccgctggaggcgctgcaagcgccatgacacctggtgaagtcctctttgccaattctttgggcctgggctgctctaggacgaggggtctgttcctggagatgttcggcaccgctatcctatgtttaacagtcttaatgacggctgtggagaagcgtgaaaccaactttatggctgcgctgcccatcggcatctccctgtttatcgcacacgtcgctttgactgcatacacaggcacaggtgtcaaccctgcgaggtccttgggtgctgctgtcgcagccagatacttccctcattaccactggatttattggattggcacgctgttaggatccattttagcatggtctgtatggcaattattgcaaatcttagactacacaacctacgttaccgctgaaaaggctgccagcaccaaggaaaaagctcaaaaaaaaggtgaaaccagcagttcctctgctgtggctgaagtctaa

SEQ ID NO: 11790 - DNA, 918 bp, Artificial Sequence
  Description of Artificial Sequence: Synthetic polynucleotide
atgtcttccaacgattccaacgataccgacaagcaacatacacgtttggatcctaccggtgtggacgacgcctacatccctccggagcagccggaaacaaagcaccatcgctttaaaatctctagggacaccttgagagaccactttatcgctgcggtcggtgagttctgcggcacattcatgtttttatggtgcgcttacgttatctgcaatgtcgctaaccatgatgtcgcactcgttgcagcgcctgacggttcccatccgggtcaattgattatgattgccatcggtttcggattttccgtcatgttttctatctggtgttttgccggtgtctctggtggggctttgaatcctgctatgtctctttctttatgcttggcgagagccgtctctcctacaagatgtgtcgttatgtgggtttctcagattgttgctggaatggccgctggaggcgctgcaagcgccatgacacctggtgaagtcctctttgccaattctttgggcttgggctgctctaggacgaggggtcttttcttggagatgttcggcaccgctatcttgtgtttaacagtcttaatgacggctgtggagaagcgtgaaaccaactttatggctgcgttgcccatcggcatctccttatttatcgcacacgtcgctttgactgcatacacaggcacaggtgtcaaccctgcgaggtccttgggtgctgctgtcgcagccagatacttccctcattaccactggatttattggattggcacgttattaggatccattttagcatggtctgtatggcaattattgcaaatcttagactacacaacctacgttaccgctgaaaaggctgccagcaccaaggaaaaagctcaaaaaaaaggtgaaaccagcagttcctctgctgtggctgaagtctga

SEQ ID NO: 11791 - DNA, 471 bp, Saccharomyces cerevisiae
atgtccaacactagcgaagataacattaccgtaaggtttgtaaccgaaaacgataaggagggttggcaaaggctttggaaatcctatcaagatttttatgaagtctcttttcccgatgacttggacgatttcaatttcggcagattcctagatcctaacattaaaatgtgggcagccgtagctgtggaaagttcgagcgaaaaaattattggaatgataaactttttcaaccatatgactacttgggatttcaaggacaagatatacatcaacgatctctatgttgatgagaattctagggtcaaaggcgcgggcggcaaactaatccaatttgtctacgacgaagctgataaactgggcacaccaagcgtgtattggtgtacggatgagtcaaaccatagagctcagctgctatacgtcaaggtcggctataaagccccaaaaatattatacaagaggaagggatattaa

SEQ ID NO: 11792 - DNA, 471 bp, Artificial Sequence
  Description of Artificial Sequence: Synthetic polynucleotide
atgtccaacactagcgaagataacattaccgtaaggtttgtaaccgaaaacgataaggagggttggcaaaggctttggaaatcctatcaagatttttatgaagtctcttttcccgatgacttggacgatttcaatttcggcagattcttggatcctaacattaaaatgtgggcagccgtagctgtggaaagtagtagcgaaaaaattattggaatgataaactttttcaaccatatgactacttgggatttcaaggacaagatatacatcaacgatctctatgttgatgagaattctagggtcaaaggcgcgggcggcaaattaatccaatttgtctacgacgaagctgataaattgggcacaccaagcgtgtattggtgtacggatgagagcaaccatagagctcagttgttgtacgtcaaggtcggctataaagccccaaaaatattatacaagaggaagggatattga

SEQ ID NO: 11793 - DNA, 2634 bp, Saccharomyces cerevisiae
atgagtgaaacagtcaaagataaagttataattgatgagaaggtatccacaaaaggtactgttgattacgccgagggtgctgagtattctgagaggctttcaaatcattcatcagacttttctcagtggtatacggatgaacagatactgcactttatgaagaagctgggttatgaaaatcgcactctttatgatattccggaagacgttgcgtatatcctcaaaaaaatgcctgaattgacacttgaggattccttcaaaatactaaaagactctatcatctatttcaaggatgatgagaacattccacacgatcaatatgaggagtggaagagattggttgacttggaggacttggattcaaaagaggggatagatgaatatgatagctttgacattagagcatttgcttctgctattaaatttcattcgccttaccaagaggttagagctgttgttgatccagaagatgatcccaccattccagtggagacattccgagcatattttctggcaataatttggtctgtcatcggttcaggatttaatgagtttttttcacacagggtggtttcaatttcactgaatactccaattatccaaatgtttttatatatctgtggtaaggcttgggctaaaactatcccctgttggactataaccatcaggggcagaaagtatggtatcaatatcgataaaccatggacccaaaaagagcaaatgttttcaaccttgttatatgcaatttgtcaaggcgcgttctatactcattacaatattctaacgcaaaaactcttttaccattctgctttctcgtttggctaccaatttttactttcgttatccgtacaatttattggatttggatttgctggcatccttagaaaattcgttgtttatccagcccgtgcactatggccaacagtcatgccaactattgctatcaacaaggcactattgggtaaagaaaagcatgaatctggaatgagcaggtataaattctttttcttgactttttttatcatgttcatctataactggtttcccacttacattattaatattctaaacactttcaattggatgacctggatcaagccaagtaacattaatctcgcaaacatcacgggaggagtcactggtcttgggattaatcctatctcatcttttgactggaatgttatttcgtttaattctcctttagtttacccattttggtcatacttaacacaatatcttggttgcatattagcagctttaattgttattgcagtatactatagtaattatatgagttgccaatacctgccaatattcacaaattctttgtatactaatactggccattcctttaaagttactgaggtattagacagtgacaataagctagatgtgaaaaaatatcaaagctactcgccaccatactatagtgctggaaatttggtatcatatggtgctttcatttgcgcatatcctctgatgattacatggtcgtttattgtacactcaaagttattgttcaatgctttcaaagattgggctttgaatttgtgggccatgagaaaacttaaatcttgggtcacaatgttcaaaagcgattacagggcgctcgacgattatgatgacccacattctaatgccatgaaaaactataaagaagttccagattggtggtattttgccatattgataggttcacttgttgttggaatagctgttgtagagcactacccaacaaatacaccagtttggggtctttttgtttgtttaggatttaattttgttttcttgattccaactactatccttcaagcaaccactggttattcgtttggtttgaatctactaattgaaatggtgatggggtacgctttaccaggtaatccaatcgccataatgattttgaaggcttttggttataacatcgacggccaagcagataattacgtttctaacttaaaaatagcgcattattgtaagattccgccaatggcgctattcaggggacaatgtgttatagttttcattcagatatttgtcaatctaggtgttctgaattggcaaatctccaatatcaaagacttttgcacacctcatcaaaacgcaaaattcacctgtcctgatgctgtgacctactataatgcttccgttgtctggggtgcaattgggccaaaaagaattttcaattacatttatccaatatttaaatggtgttggttgataggcgcatgcattggcatattttttggtgtttggaagcgctggggtaagttttatcccagatattttgacccaatgttatttgtaggtggaatgcttaatatgagccctccatataacctgatgtattacacttctggtatgattgttagttacatttcccagtactacatgaaaagacaccatttaaatctgtgggagaaatataattatgttttatcggcaggcttttcaacgggcttggttttatcagctattatcattttctttgctgtccaatataaagacacagcttttaattggtggggcaatacagttccgtatgctggtgccgatggcgttggctatcctctaaagaacataactgatacagcaaatggctatttcggctatgctccaggacactatccatga

SEQ ID NO: 11794 - DNA, 2634 bp, Artificial Sequence
  Description of Artificial Sequence: Synthetic polynucleotide
atgagtgaaacagtcaaagataaagttataattgatgagaaggtatccacaaaaggtactgttgattacgccgagggtgctgagtattctgagaggctttctaatcattcttctgacttttctcagtggtatacggatgaacagatattacactttatgaagaagttgggttatgaaaatcgcactctttatgatattccggaagacgttgcgtatatcctcaaaaaaatgcctgaattgacacttgaggattccttcaaaatattgaaagactctatcatctatttcaaggatgatgagaacattccacacgatcaatatgaggagtggaagagattggttgacttggaggacttggattctaaagaggggatagatgaatatgatagctttgacattagagcatttgcttctgctattaaatttcattctccttaccaagaggttagagctgttgttgatccagaagatgatcccaccattccagtggagacattcagagcatattttttggcaataatttggtctgtcatcggttctggatttaatgagtttttttctcacagggtggtttctatttctttgaatactccaattatccaaatgtttttatatatctgtggtaaggcttgggctaaaactatcccctgttggactataaccatcaggggcagaaagtatggtatcaatatcgataaaccatggacccaaaaagagcaaatgttttccaccttgttatatgcaatttgtcaaggcgcgttctatactcattacaatattttaacgcaaaaactcttttaccattctgctttctcctttggctaccaatttttactttctttatccgtacaatttattggatttggatttgctggcatccttagaaaattcgttgtttatccagcccgtgcattatggccaacagtcatgccaactattgctatcaacaaggcattattgggtaaagaaaagcatgaatctggaatgagcaggtataaattctttttcttgactttttttatcatgttcatctataactggtttcccacttacattattaatattttgaacactttcaattggatgacctggatcaagccaagtaacattaatctcgcaaacatcacgggaggagtcactggtcttgggattaatcctatctcttcttttgactggaatgttatttcctttaattctcctttagtttacccattttggagttacttaacacaatatcttggttgcatattagcagctttaattgttattgcagtatactatagtaattatatgagttgccaatacttgccaatattcacaaattctttgtatactaatactggccattcctttaaagttactgaggtattagacagtgacaataagttggatgtgaaaaaatatcaaagctactctccaccatactatagtgctggaaatttggtatcttatggtgctttcatttgcgcatatcctttgatgattacatggtcttttattgtacactccaagttattgttcaatgctttcaaagattgggctttgaatttgtgggccatgagaaaacttaaatcttgggtcacaatgttcaaaagcgattacagggcgctcgacgattatgatgacccacattctaatgccatgaaaaactataaagaagttccagattggtggtattttgccatattgataggttctcttgttgttggaatagctgttgtagagcactacccaacaaatacaccagtttggggtctttttgtttgtttaggatttaattttgttttcttgattccaactactatccttcaagcaaccactggttattcttttggtttgaatttattgattgaaatggtgatggggtacgctttaccaggtaatccaatcgccataatgattttgaaggcttttggttataacatcgacggccaagcagataattacgtttctaacttaaaaatagcgcattattgtaagattccgccaatggcgttattcaggggacaatgtgttatagttttcattcagatatttgtcaatttgggtgttttgaattggcaaatctccaatatcaaagacttttgcacacctcatcaaaacgcaaaattcacctgtcctgatgctgtgacctactataatgcttccgttgtctggggtgcaattgggccaaaaagaattttcaattacatttatccaatatttaaatggtgttggttgataggcgcatgcattggcatattttttggtgtttggaagcgctggggtaagttttatcccagatattttgacccaatgttatttgtaggtggaatgcttaatatgagccctccatataacttgatgtattacacttctggtatgattgttagttacatttcccagtactacatgaaaagacaccatttaaatttatgggagaaatataattatgttttaagtgcaggcttttctacgggcttggttttatctgctattatcattttctttgctgtccaatataaagacacagcttttaattggtggggcaatacagttccgtatgctggtgccgatggcgttggctatcctttgaagaacataactgatacagcaaatggctatttcggctatgctccaggacactatccatga

SEQ ID NO: 11795 - DNA, 330 bp, Saccharomyces cerevisiae
atgaattctctcatccctcttttagtggaagcatcaacatacattgtaagaggagaaagcagcatctcaattgccattggaatagggcctcaagctagcaggagtgtgccgtaccacattctttgcaggggatgtgacggcacggtaacaacttttcgtacgtggcatacgcaaccactcgggccttgcaatacaatcatcataggcagaaaaggtaatgagacaaccggcggcgcagaacagaggaggcagcagcacttaacgtctgattcagcaacaaaagcgtcattggtgggtttttgtgggctgtattattatttcaggaaatag

SEQ ID NO: 11796 - DNA, 330 bp, Artificial Sequence
  Description of Artificial Sequence: Synthetic polynucleotide
atgaattctctcatccctcttttagtggaagcaagcacatacattgtaagaggagaaagcagcatctctattgccattggaatagggcctcaagctagcaggagtgtgccgtaccacattctttgcaggggatgtgacggcacggtaacaacttttcgtacgtggcatacgcaaccactcgggccttgcaatacaatcatcataggcagaaaaggtaatgagacaaccggcggcgcagaacagaggaggcagcagcacttaacgtctgattctgcaacaaaagcgtctttggtgggtttttgtgggttatattattatttcaggaaatga

SEQ ID NO: 11797 - DNA, 1413 bp, Saccharomyces cerevisiae
atgagtattgtaagacagtcatgtgattgctgtcgcgttcgtcgagtgaagtgtgataggaatagaccgtgtgatcgttgccgtcagcgcaatttgagatgcacttatttacaaccgttaaggaaacgaggtcccaagtccatcggagaaagcaaccttgaaagagcagctgaaatacagatggtgactgtaaacaataacatcatggcggccccagtaatgtataaaaaggttccaaagaaggtgattgatcaatgtttgagactatatcacgatcaactatacgtgatttggccaatgctcagttacgatgatctttacaagcttttggaggaaaattatgaggactgcagcacttattggtttttagtgtctctatctgcagcaactcttagtgatctgcatacaaaaatagaatacaagaagggatttttttttgctggagaacaattgtgtaatctttgtatgtcatcgcgacggtttttcgacgatctcagtaatagtgatatatttcgaattatgacatattattgtttgcatcgttgttatgcacagtttgctgatacaagaacctcatacagactttcttgtgaggctattggcctcataaaaatagctggatttcatcgggaagaaacttatgagtttcttccatttggtgagcaacaacttataagaaaggtttactatctgcttctcatgacagagaggtactatgccgtatacattaaatgtgtaacaagtttggataccactatatctccaccacaacccgaaatcgtaactgattcccgactttctttggatagttttcttgaggtgattaaagtattcactgttcctgggaaatacttttacgatgccttagctaccaacagtgttaatggttcctatactgaagactctctaaaaaggatatggaatgaacttcacataagctcacttgatatagagccatactcttacggatacatagactatctcttttctcggcactgggtcaggactctagcatggaagttggtactaaataagaaggatatgcggatgaattttttttcgaatactaacgccacacacattccagtcgaaatagccaaggatatgttacaggatacacttttaactccaatcgacctatatgatgtgcatggtcctgtgataccaatgaaggcgctagaaatagccaatgcattggtagacgtcgtaagtaagtatgatcacaatatgaagttggaggcttggaatattttgtgcgatgtatctaagttcgttttctccctgaaacattgcaatcataaaatgtttcaaaggttttcaactaaatgtcagagtgctctaatcgatttgcctatctctagaccactgcgcctaaatgatgattccaaggatgaagtcgacattattccctaa

SEQ ID NO: 11798 - DNA, 1413 bp, Artificial Sequence
  Description of Artificial Sequence: Synthetic polynucleotide
atgagtattgtaagacagtcctgtgattgctgtcgcgttcgtcgtgtgaagtgtgataggaatagaccgtgtgatcgttgccgtcagcgcaatttgagatgcacttatttacaaccgttaaggaaaagaggtcccaagtccatcggagaaagcaaccttgaaagagcagctgaaatacagatggtgactgtaaacaataacatcatggcggccccagtaatgtataaaaaggttccaaagaaggtgattgatcaatgtttgagattatatcacgatcaattgtacgtgatttggccaatgctcagttacgatgatctttacaagcttttggaggaaaattatgaggactgcagcacttattggtttttagtgtctttatctgcagcaactcttagtgatttgcatacaaaaatagaatacaagaagggatttttttttgctggagaacaattgtgtaatctttgtatgtcttctagaagatttttcgacgatctcagtaatagtgatatatttagaattatgacatattattgtttgcatcgttgttatgcacagtttgctgatacaagaacctcttacagactttcttgtgaggctattggcctcataaaaatagctggatttcatagagaagaaacttatgagtttcttccatttggtgagcaacaacttataagaaaggtttactatttacttctcatgacagagaggtactatgccgtatacattaaatgtgtaacaagtttggataccactatatctccaccacaacccgaaatcgtaactgattcccgtctttctttggatagttttcttgaggtgattaaagtattcactgttcctgggaaatacttttacgatgccttagctaccaacagtgttaatggttcctatactgaagactctttgaaaaggatatggaatgaacttcacataagctctcttgatatagagccatactcttacggatacatagactatctcttttctagacactgggtcaggactttggcatggaagttggtattgaataagaaggatatgagaatgaattttttttctaatactaacgccacacacattccagtcgaaatagccaaggatatgttacaggatacacttttaactccaatcgacctttatgatgtgcatggtcctgtgataccaatgaaggcgttagaaatagccaatgcattggtagacgtcgtaagtaagtatgatcacaatatgaagttggaggcttggaatattttgtgcgatgtatctaagttcgttttctccttgaaacattgcaatcataaaatgtttcaaaggttttccactaaatgtcagagtgctttgatcgatttgcctatctctagaccattgcgcttgaatgatgattccaaggatgaagtcgacattattccctga

SEQ ID NO: 11799 - DNA, 1632 bp, Saccharomyces cerevisiae
atgaagagtactttgagtttaactttatgtgttatatcgcttctattaaccctttttctggcggccttggatattgttatagtggttactttatatgatacaattggcattaagttccatgacttcggcaatattggttggttagttactggatatgctctttctaatgctgttttcatgttattatggggtcgcttggccgaaatacttggtacaaaggagtgcttaatgatttctgttattgtatttgaaatagggtctttgatttctgctctttcgaattcaatggcgactctgattagcggaagagtcgttgctgggtttggaggaagtggaattgaatcacttgcttttgtagttggaacatccattgtccgagaaaaccatagaggaattatgataacggcactcgctatatcgtatgtcattgcagagggagtcgggccttttattggtggtgcatttaatgaacatttgtcttggagatggtgcttttatataaatcttccaatcggtgcgtttgcgttcataatattggcattttgtaacacatctggagaaccacatcaaaaaatgtggctaccatcaaaaatcaaaaaaattatgaactatgactatggcgaattattgaaagcaagtttttggaagaatacatttgaagtacttgtatttaaactagacatggttgggattattttatcttcagcaggctttacactactgatgttaggtctttcatttggtggaaacaacttcccatggaattcgggtatcattatttgcttttttaccgtgggccctatcttattgttactattttgtgcttacgactttcattttctgtcattatcggggcttcactatgacaacaagcggatcaaaccgttactgacatggaatattgcctcaaattgtggcatatttacaagctccataacaggattcctttcttgctttgcttatgaattacagtctgcttatttagtccagctttatcaactagtatttaaaaaaaagcctacattagcgagtatacatctttgggaactatcaattccagctatgattgcaactatggccatagcatatctaaattcaaaatatggcatcatcaaaccggcaattgtttttggtgtgctttgtgggattgttggatctggtttatttacgctaatcaatggcgaactctctcagtcaataggttattcaattctcccaggaatagcttttggtagtattttccaagcaacgttattaagctcccaggtgcagataacatcagacgatccagactttcaaaacaagtttattgaagtcacagctttcaactcgttcgccaaatccttgggctttgcgtttggagggaatatgggggcaatgatattcactgcatcactcaaaaaccagatgcgctcttcccaattaaacataccacaatttacgtctgtagaaacacttttagcgtatagcacagaacattatgatggcccccaatcttcactatcaaagttcataaacacagctatccatgacgttttttactgcgccttaggatgctatgctctttcattcttctttggaatattcacttcgagtaagaaaacaacaatatcagccaaaaagcaacaatga

SEQ ID NO: 11800 - DNA, 1632 bp, Artificial Sequence
  Description of Artificial Sequence: Synthetic polynucleotide
atgaagagtactttgagtttaactttatgtgttatatctcttttattaaccctttttttggcggccttggatattgttatagtggttactttatatgatacaattggcattaagttccatgacttcggcaatattggttggttagttactggatatgctctttctaatgctgttttcatgttattatggggtcgcttggccgaaatacttggtacaaaggagtgcttaatgatttctgttattgtatttgaaatagggtctttgatttctgctctttctaattctatggcgactttgattagcggaagagtcgttgctgggtttggaggaagtggaattgaatctcttgcttttgtagttggaacatccattgtcagagaaaaccatagaggaattatgataacggcactcgctatatcttatgtcattgcagagggagtcgggccttttattggtggtgcatttaatgaacatttgtcttggagatggtgcttttatataaatcttccaatcggtgcgtttgcgttcataatattggcattttgtaacacatctggagaaccacatcaaaaaatgtggttaccatctaaaatcaaaaaaattatgaactatgactatggcgaattattgaaagcaagtttttggaagaatacatttgaagtacttgtatttaaattagacatggttgggattattttatcttctgcaggctttacattattgatgttaggtctttcttttggtggaaacaacttcccatggaattctggtatcattatttgcttttttaccgtgggccctatcttattgttacttttttgtgcttacgactttcattttttatctttaagtgggcttcactatgacaacaagagaatcaaaccgttattaacatggaatattgcctctaattgtggcatatttacaagctccataacaggattcctttcttgctttgcttatgaattacagtctgcttatttagtccagctttatcaattggtatttaaaaaaaagcctacattagcgagtatacatctttgggaattatccattccagctatgattgcaactatggccatagcatatttgaattctaaatatggcatcatcaaaccggcaattgtttttggtgtgctttgtgggattgttggatctggtttatttacgttgatcaatggcgaactctctcagagtataggttattctattctcccaggaatagcttttggtagtattttccaagcaacgttattaagctcccaggtgcagataacaagtgacgatccagactttcaaaacaagtttattgaagtcacagctttcaactctttcgccaaatccttgggctttgcgtttggagggaatatgggggcaatgatattcactgcaagtctcaaaaaccagatgcgctcttcccaattaaacataccacaatttacgtctgtagaaacacttttagcgtatagcacagaacattatgatggcccccaatcttctttatccaagttcataaacacagctatccatgacgttttttactgcgccttaggatgctatgctctttctttcttctttggaatattcacttctagtaagaaaacaacaatatctgccaaaaagcaacaatga

SEQ ID NO: 11801 - DNA, 885 bp, Saccharomyces cerevisiae
atggcaaaaccgcgtggaagaaaaggcggcaggaagccttcacttactccacctaaaaataagagagctgcgcaacttagagcatcccaaaacgcatttagaaaacgaaagttggaaagattagaagaactagagaagaaagaagctcagctaacggtaacaaatgatcaaattcacatattaaagaaggaaaatgaacttctccattttatgttgaggagtcttttgactgagaggaacatgccttctgatgaacggaacattagtaaggcctgttgtgaagaaaaaccgcccacatgtaacactctcgatggtagtgtggttctttcctccacatataattcccttgaaatacaacaatgctacgtatttttcaagcaactgctctcagtgtgtgttggaaagaattgtacagtgccgtcaccgttgaattcctttgatcggtccttctatcccataggctgtacgaatctctcaaatgacataccaggctattcttttctaaatgatgcaatgagtgagattcatacgtttggtgactttaatggggaacttgatagtacctttttggagtttagtgggactgaaataaaggagccaaataatttcattactgaaaacactaatgcaatagaaacagcggcagcgagcatggtgattaggcagggtttccatccaagacagtattatacagtggatgcttttggaggggacgtcctattaagtgcgatggatatttggagttttatgaaagtgcatccaaaggttaacacatttgaccttgaaattttgggaacagaacttaagaaaagtgctacgtgttctaattttgatattttaattagcctcaagcatttcattaaggtcttttcgtcaaaattataa

SEQ ID NO: 11802 - DNA, 885 bp, Artificial Sequence
  Description of Artificial Sequence: Synthetic polynucleotide
atggcaaaaccgcgtggaagaaaaggcggcaggaagccttctcttactccacctaaaaataagagagctgcgcaacttagagcatcccaaaacgcatttagaaaaagaaagttggaaagattagaagaattagagaagaaagaagctcagttaacggtaacaaatgatcaaattcacatattaaagaaggaaaatgaacttctccattttatgttgaggagtcttttgactgagaggaacatgccttctgatgaaagaaacattagtaaggcctgttgtgaagaaaaaccgcccacatgtaacactctcgatggtagtgtggttctttcctccacatataattcccttgaaatacaacaatgctacgtatttttcaagcaattgctctctgtgtgtgttggaaagaattgtacagtgccgtctccgttgaattcctttgatagatccttctatcccataggctgtacgaatctctctaatgacataccaggctattcttttttgaatgatgcaatgagtgagattcatacgtttggtgactttaatggggaacttgatagtacctttttggagtttagtgggactgaaataaaggagccaaataatttcattactgaaaacactaatgcaatagaaacagcggcagcgagcatggtgattaggcagggtttccatccaagacagtattatacagtggatgcttttggaggggacgtccttttaagtgcgatggatatttggagttttatgaaagtgcatccaaaggttaacacatttgaccttgaaattttgggaacagaacttaagaaaagtgctacgtgttctaattttgatattttaattagcctcaagcatttcattaaggtcttttcttctaaattatga

SEQ ID NO: 11803 - DNA, 393 bp, Saccharomyces cerevisiae
atggtaagtttcataacgtctaggcaactcaagggcctaattgaaaatcagaggaaggattttcaagttgttgatcttcgaagagaagattttgcacgtgatcatattacaaacgcttggcatgttccagtaacagcacagattacagagaagcaactgaatcaattaattaaaggtttatccgatactttctcaagttctcaattcgtcaaagtgatatttcattgtactgggtccaagaataggggaccaaaagtagctgctaaattcgaaacctacttacaagaagaagatattacaagtaagtttgagagttgcatcctcgttggaggtttttacgcttgggagacccattgtagagagagtaaccttaaattgattgttagtggttga

SEQ ID NO: 11804 - DNA, 393 bp, Artificial Sequence
  Description of Artificial Sequence: Synthetic polynucleotide
atggtaagtttcataacgtctaggcaactcaagggcttaattgaaaatcagaggaaggattttcaagttgttgatcttagaagagaagattttgcacgtgatcatattacaaacgcttggcatgttccagtaacagcacagattacagagaagcaattgaatcaattaattaaaggtttatccgatactttctctagttctcaattcgtcaaagtgatatttcattgtactgggtccaagaataggggaccaaaagtagctgctaaattcgaaacctacttacaagaagaagatattacaagtaagtttgagagttgcatcctcgttggaggtttttacgcttgggagacccattgtagagagagtaaccttaaattgattgttagtggttga

SEQ ID NO: 11805 - DNA, 1215 bp, Saccharomyces cerevisiae
atgtcagaagatcaaaaaagtgaaaattcggtaccttctaaggttaatatggtgaatcgcaccgatatactgactacgatcaagtcattgtcatggcttgacttgatgttgccatttactataattctctccataatcattgcagtaataatttctgtctatgtgccttcttcccgtcacacttttgacgctgaaggtcatcccaatctaatgggagtgtccattcctttgactgttggtatgattgtaatgatgattcccccgatctgcaaagtttcctgggagtctattcacaagtacttctacaggagctatataaggaagcaactagccctctcgttatttttgaattgggtcatcggtcctttgttgatgacagcattggcgtggatggcgctattcgattataaggaataccgtcaaggcattattatgatcggagtagctagatgcattgccatggtgctaatttggaatcagattgctggaggagacaatgatctctgcgtcgtgcttgttattacaaactcgcttttacagatggtattatatgcaccattgcagatattttactgttatgttatttctcatgaccacctgaatacttcaaatagggtattattcgaagaggttgcaaagtctgtcggagtttttctcggcataccactgggaattggcattatcatacgtttgggaagtcttaccatagctggtaaaagtaattatgaaaaatacattttgagatttatttctccatgggcaatgatcggatttcattacactttatttgttatttttattagtagaggttatcaatttatccacgaaattggttctgcaatattgtgctttgtcccattggtgctttacttctttattgcatggtttttgaccttcgcattaatgaggtacttatcaatatctaggagtgatacacaaagagaatgtagctgtgaccaagaactacttttaaagagggtctggggaagaaagtcttgtgaagctagcttttctattacgatgacgcaatgtttcactatggcttcaaataattttgaactatccctggcaattgctatttccttatatggtaacaatagcaagcaagcaatagctgcaacatttgggccgttgctagaagttccaattttattgattttggcaatagtcgcgaggatccttaaaccatattatatatggaacaatagaaattaa

SEQ ID NO: 11806 - DNA, 1215 bp, Artificial Sequence
  Description of Artificial Sequence: Synthetic polynucleotide
atgtctgaagatcaaaaaagtgaaaattctgtaccttctaaggttaatatggtgaatcgcaccgatatattgactacgatcaagtctttgtcctggcttgacttgatgttgccatttactataattctctccataatcattgcagtaataatttctgtctatgtgccttcttcccgtcacacttttgacgctgaaggtcatcccaatttaatgggagtgtccattcctttgactgttggtatgattgtaatgatgattcccccgatctgcaaagtttcctgggagtctattcacaagtacttctacaggagctatataaggaagcaattggccctctctttatttttgaattgggtcatcggtcctttgttgatgacagcattggcgtggatggcgttattcgattataaggaataccgtcaaggcattattatgatcggagtagctagatgcattgccatggtgttgatttggaatcagattgctggaggagacaatgatctctgcgtcgtgcttgttattacaaactctcttttacagatggtattatatgcaccattgcagatattttactgttatgttatttctcatgaccacttgaatacttccaatagggtattattcgaagaggttgcaaagtctgtcggagtttttctcggcataccattaggaattggcattatcatacgtttgggaagtcttaccatagctggtaaaagtaattatgaaaaatacattttgagatttatttctccatgggcaatgatcggatttcattacactttatttgttatttttattagtagaggttatcaatttatccacgaaattggttctgcaatattgtgctttgtcccattggtgctttacttctttattgcatggtttttgaccttcgcattaatgaggtacttatctatatctaggagtgatacacaaagagaatgtagctgtgaccaagaattgcttttaaagagggtctggggaagaaagtcttgtgaagctagcttttctattacgatgacgcaatgtttcactatggcttctaataattttgaattatccttggcaattgctatttccttatatggtaacaatagcaagcaagcaatagctgcaacatttgggccgttgttggaagttccaattttattgattttggcaatagtcgcgaggatccttaaaccatattatatatggaacaatagaaattga

SEQ ID NO: 11807 - DNA, 717 bp, Saccharomyces cerevisiae
atggaaattgaaaacgaacagatttgcacctgcatagcgcagattctgcatcttctcaatagcttaattattacattctcagatgatgataagacggaaactggacaatcttttgtttatattgatggatttcttgtcaaaaagcataacaatcaacatactattgttaatttcgaaacttacaaaaataaaatgaaagtttccgataggcgtaagtttgaaaaagcaaactttgacgagtttgagtcggctctaaataacaaaaacgacttggtacattgtccctcaataactttatttgaatcgatccccacggaagtgcggtcattctacgaagacgaaaagtctggcctaatcaaagtggtaaaattcagaactggtgcaatggataggaaaaggtcttttgaaaaaattgtcatttccgtcatggtcgggaaaaatgtacaaaagttcctgacatttgttgaagacgaaccagatttccagggcggaccaatcccttcaaagtatcttattcccaagaaaatcaacttgatggtctacacgttgtttcaagtgcatactttgaaattcaatagaaaggattacgataccctttctcttttttacctcaacagaggatactataatgagttgagttttccgtgtcctggaacgttgtcacgaaatagcgagtgccaggccgaacgacagctctacgatgcgtactttcactga

SEQ ID NO: 11808 - DNA, 717 bp, Artificial Sequence
  Description of Artificial Sequence: Synthetic polynucleotide
atggaaattgaaaacgaacagatttgcacctgcatagcgcagattttgcatcttctcaatagcttaattattacattcagtgatgatgataagacggaaactggacaatcttttgtttatattgatggatttcttgtcaaaaagcataacaatcaacatactattgttaatttcgaaacttacaaaaataaaatgaaagtttccgataggcgtaagtttgaaaaagcaaactttgacgagtttgagtctgctttgaataacaaaaacgacttggtacattgtccctccataactttatttgaaagtatccccacggaagtgagatctttctacgaagacgaaaagtctggcttaatcaaagtggtaaaattcagaactggtgcaatggataggaaaaggtcttttgaaaaaattgtcatttccgtcatggtcgggaaaaatgtacaaaagttcttaacatttgttgaagacgaaccagatttccagggcggaccaatcccttctaagtatcttattcccaagaaaatcaacttgatggtctacacgttgtttcaagtgcatactttgaaattcaatagaaaggattacgataccctttctcttttttacctcaacagaggatactataatgagttgagttttccgtgtcctggaacgttgagcagaaatagcgagtgccaggccgaaagacagctctacgatgcgtactttcactga

SEQ ID NO: 11809 - DNA, 309 bp, Saccharomyces cerevisiae
atgcgtactttcactgactttgtttctggcgcacctattgtaaggagtcttcagaaaagcaccataaggaaatatgggtacaatttggcaccccacatgtttttgttactacacgtagatgagctatcgattttttctgcataccaagcaagtttacctggcgaaaagaaagtcgacacagagcggctgaagcgtgatctatgcccacgtaaacccattgagataaagtacttttcacagatatgtaacgatatgatgaacaaaaaggaccgattgggtgatgttttgcatgtgtgctgcccaagttga

SEQ ID NO: 11810 - DNA, 309 bp, Artificial Sequence
  Description of Artificial Sequence: Synthetic polynucleotide
atgcgtactttcactgactttgtttctggcgcacctattgtaaggagtcttcagaaaagcaccataaggaaatatgggtacaatttggcaccccacatgtttttgttattacacgtagatgagttatccattttttctgcataccaagcaagtttacctggcgaaaagaaagtcgacacagagaggttaaagcgtgatttatgcccacgtaaacccattgagataaagtacttttcccagatatgtaacgatatgatgaacaaaaaggacagattgggtgatgttttgcatgtgtgctgcccaagttga

SEQ ID NO: 11811 - DNA, 3099 bp, Saccharomyces cerevisiae
atggcagacacaccctctgtggcagtacaggccccaccgggctatggtaagacggagttatttcatctccccttgatagcactggcgtctaagggcgacgtgaaatatgtgtcgtttctgtttgtaccgtacacagtgttgcttgctaattgcatgatcaggttgggccgatgcggttgcttgaatgtggcccctgtaagaaactttattgaagaaggttgcgatggcgttactgatttatacgtggggatctacgatgatcttgctagcactaatttcacagacaggatagctgcgtgggagaatattgttgagtgcacctttaggaccaacaacgtaaaattgggttacctcattgtagatgagtttcacaactttgaaacggaggtctaccggcagtcgcaatttgggggcataactaaccttgattttgacgcttttgagaaagcaatctttttgagcggcacagcacctgaggctgtagctgatgctgcgttgcagcgtattgggcttacgggactggccaagaagtcgatggacatcaacgagctcaaacggtcggaagatctcagcagaggtctatccagctatccaacacggatgtttaatctaatcaaggagaaatccgaggtgcctttagggcatgttcataaaatttggaagaaagtggaatcacagcccgaagaagcactgaagcttcttttagccctctttgaaattgaaccagagtcgaaggccattgtagttgcaagcacaaccaacgaagtggaagaattggcctgctcttggagaaagtattttagggtggtatggatacacgggaagctgggtgctgcagaaaaggtgtctcgcacaaaggagtttgtcactgacggtagcatgcgagttctcatcggaacgaaattagtgactgaaggaattgacattaagcaattgatgatggtgatcatgcttgataatagacttaatattattgagctcattcaaggcgtagggagactaagagatgggggcctctgttatctattatctagaaaaaacagttgggcggcaaggaatcgtaagggtgaattaccaccgattaaggaaggctgtataaccgaacaggtacgcgagttctatggacttgaatcaaagaaaggaaaaaagggccagcatgttggatgctgtggctccaggacagacctgtctgctgacacagtggaactgatagaaagaatggacagattggctgaaaaacaggcgacagcttccatgtcgatcgttgcgttaccgtctagcttccaggagagcaatagcagtgacaggtgcagaaagtattgcagcagtgatgaggacagcaacacgtgcattcatggtagtgctaatgccagtaccaatgcgactaccaactccagcactaatgctactaccactgccagcaccaacgtcaggactagtgctactaccactgccagcatcaacgtcaggactagtgcgactaccactgaaagtaccaactccagcactaatgctactaccactgccagcaccaacgtcaggactagtgctactaccactgccagcatcaacgtcaggactagtgcgactaccactgaaagtaccaactccaacactagtgctactaccaccgaaagtaccgactccaacactagtgctactaccactgaaagtaccaactccagcactaatgctactaccactgccagcatcaacgtcaggactagtgcgactaccactgaaagtaccaactccaacactaatgctactaccactgaaagtaccaactccagcactaatgctactaccactgaaggtaccaactccaacactagtgctactaccactgctagcaccaactccagcactaatgctactaccactgaaagtaccaacgctagtgccaaggaggacgccaataaagatggcaatgctgaggataatagattccatccagtcaccgacattaacaaagagtcgtataagcggaaagggagtcaaatggttttgctagagagaaagaaactgaaagcacaatttcccaatacttccgagaatatgaatgtcttacagtttcttggatttcggtctgacgaaattaaacatcttttcctctatggtattgacgtatacttctgcccagagggagtattcacacaatacggattatgcaagggctgtcaaaagatgttcgagctctgtgtctgttgggctggccagaaagtatcgtatcggaggatggcttgggaagcactagctgtggagagaatgctgcgaaatgacgaggaatacaaagaatacttggaagacatcgagccatatcatggggaccctgtaggatatttgaaatattttagcgtaaaaaggggagagatctactctcagatacagagaaattatgcttggtacctggccattactagaagaagagaaacaattagtgtattggattcgacaagaggcaagcaagggagccaagttttccgcatgtctggaaggcagatcaaagagttgtattataaagtatggagcaacttgcgtgaatcgaagacagaggtgctgcagtactttttgaactgggacgaaaaaaagtgccgggaagaatgggaggcaaaagacgatacggtctttgtggaagcgctcgagaaagttggagtttttcagcgtttgcgttccatgacgagcgctggactgcagggtccgcagtacgtcaagctgcagtttagcaggcatcatcgacagttgaggagcagatatgaattaagtctaggaatgcacttgcgagatcagcttgcgctgggagttaccccatctaaagtgccgcattggacggcattcctgtcgatgctgatagggctgttctgcaataaaacatttcggcagaaactggaatatcttttggagcagatttcggaggtgtggttgttaccacattggcttgatttggcaaacgttgaagttctcgctgcagataacacgagggtaccgctgtacatgctgatggtagcggttcacaaagagctggatagcgatgatgttccagacggtagatttgatatattattatgtagagattcgagcagagaagttggagagtga

SEQ ID NO: 11812 - DNA, 3099 bp, Artificial Sequence
  Description of Artificial Sequence: Synthetic polynucleotide
atggcagacacaccctctgtggcagtacaggccccaccgggctatggtaagacggagttatttcatctccccttgatagcattagcgtctaagggcgacgtgaaatatgtgtcctttttgtttgtaccgtacacagtgttgcttgctaattgcatgatcaggttgggccgttgcggttgcttgaatgtggcccctgtaagaaactttattgaagaaggttgcgatggcgttactgatttatacgtggggatctacgatgatcttgctagcactaatttcacagacaggatagctgcgtgggagaatattgttgagtgcacctttaggaccaacaacgtaaaattgggttacctcattgtagatgagtttcacaactttgaaacggaggtctacagacagtctcaatttgggggcataactaaccttgattttgacgcttttgagaaagcaatctttttgagcggcacagcacctgaggctgtagctgatgctgcgttgcagcgtattgggcttacgggattggccaagaagtctatggacatcaacgagctcaaaagaagtgaagatctcagcagaggtttatccagctatccaacaagaatgtttaatttgatcaaggagaaatccgaggtgcctttagggcatgttcataaaatttggaagaaagtggaatctcagcccgaagaagcattgaagcttcttttagccctctttgaaattgaaccagagtctaaggccattgtagttgcaagcacaaccaacgaagtggaagaattggcctgctcttggagaaagtattttagggtggtatggatacacgggaagttgggtgctgcagaaaaggtgtctcgcacaaaggagtttgtcactgacggtagcatgagagttctcatcggaacgaaattagtgactgaaggaattgacattaagcaattgatgatggtgatcatgcttgataatagacttaatattattgagctcattcaaggcgtagggagattgagagatgggggcctctgttatcttttatctagaaaaaacagttgggcggcaaggaatcgtaagggtgaattaccaccgattaaggaaggctgtataaccgaacaggtacgcgagttctatggacttgaatccaagaaaggaaaaaagggccagcatgttggatgctgtggctccaggacagacttgtctgctgacacagtggaattgatagaaagaatggacagattggctgaaaaacaggcgacagcttccatgtccatcgttgcgttaccgtctagcttccaggagagcaatagcagtgacaggtgcagaaagtattgcagcagtgatgaggacagcaacacgtgcattcatggtagtgctaatgccagtaccaatgcgactaccaactccagcactaatgctactaccactgccagcaccaacgtcaggactagtgctactaccactgccagcatcaacgtcaggactagtgcgactaccactgaaagtaccaactccagcactaatgctactaccactgccagcaccaacgtcaggactagtgctactaccactgccagcatcaacgtcaggactagtgcgactaccactgaaagtaccaactccaacactagtgctactaccaccgaaagtaccgactccaacactagtgctactaccactgaaagtaccaactccagcactaatgctactaccactgccagcatcaacgtcaggactagtgcgactaccactgaaagtaccaactccaacactaatgctactaccactgaaagtaccaactccagcactaatgctactaccactgaaggtaccaactccaacactagtgctactaccactgctagcaccaactccagcactaatgctactaccactgaaagtaccaacgctagtgccaaggaggacgccaataaagatggcaatgctgaggataatagattccatccagtcaccgacattaacaaagagtcttataagagaaaagggagtcaaatggttttgttggagagaaagaaattgaaagcacaatttcccaatacttccgagaatatgaatgtcttacagtttcttggatttagatctgacgaaattaaacatcttttcctctatggtattgacgtatacttctgcccagagggagtattcacacaatacggattatgcaagggctgtcaaaagatgttcgagctctgtgtctgttgggctggccagaaagtatcttatagaaggatggcttgggaagcattggctgtggagagaatgttaagaaatgacgaggaatacaaagaatacttggaagacatcgagccatatcatggggaccctgtaggatatttgaaatattttagcgtaaaaaggggagagatctactctcagatacagagaaattatgcttggtacttggccattactagaagaagagaaacaattagtgtattggattctacaagaggcaagcaagggagccaagttttccgcatgtctggaaggcagatcaaagagttgtattataaagtatggagcaacttgcgtgaatccaagacagaggtgttacagtactttttgaactgggacgaaaaaaagtgcagagaagaatgggaggcaaaagacgatacggtctttgtggaagcgctcgagaaagttggagtttttcagcgtttgcgttccatgacgagcgctggattacagggtccgcagtacgtcaagttacagtttagcaggcatcatagacagttgaggagcagatatgaattaagtttgggaatgcacttgagagatcagcttgcgttgggagttaccccatctaaagtgccgcattggacggcattcttgtccatgttgatagggcttttctgcaataaaacatttagacagaaattagaatatcttttggagcagatttctgaggtgtggttgttaccacattggcttgatttggcaaacgttgaagttctcgctgcagataacacgagggtaccgttgtacatgttaatggtagcggttcacaaagagttagatagcgatgatgttccagacggtagatttgatatattattatgtagagattctagcagagaagttggagagtga
